United States Patent Application Publication US 2026/0191916 A1 - sequence listing, part 24

SEQ ID NO: 44 - DNA, 1587276 bp, Eggerthella lenta
  source 1..1587276: mol_type = genomic DNA
cggaagcggccatcggctccgtatccccgagggtttcgctcgactttacataaccgcgcttatcggggacggggtggtggtatgatgggcggggtcacggtgaccccgtggttgattggttttggagtattcgatattgaaagtgcatgtgatcgtaaaatgaaaagtaatatgctataaatacgaatattttagttaaaatatgcaaatttgagaaaggcttccgcttatgtcatctccctatcaaacgctcactttgccggttgacagcatccagtcgcacccggagaacgacttcaccatggacgaaagcgagatgcaggagctcgtcgcgtccatccgctccgagggcctcgggcagctgccgctcgtgcgcaagctgccggacggcgcctaccagatgatcgccggccaccgccgactcgaggcgtacaagcgccttgcccgcgaggacgcggccttccgcgccatcccggtcacgctcgtcgacgacctcgacgacgcccgcgcccgcgtgctgctcaatgtcaccaacctcgtgacccgccgcctgtcgcaggaggagcgcggcgcgcgctacgcggccatcggcagggaagtgccggcgctgcgcgaggccgacccgtcgctcaagggcgtgcgcacgaacgacatcatcgcgcgcatcgtgaccgaggagacggggcagtcggtgtcgccggccacggtcaagcgcgccatcgcggccgagaggcgcctgcgcgaaacgcgcgagcaagcggagcttctcacgggcgacctgaacgagaactggcaggtggaggcgcaggcgggggccatcgatccgctcacgttgcgtgccatctcggaattgccgaaccagaaacagctcgatctgttcgccgaataccagcgccaggagatgacgctcggccagctgaaggctcacctcaaagcgtcacggcccaagacgacggccgatgcggctcgcgcgctgcagcttgccatccgcagcgcggaggaggcgcgccagatggatcgcgccggggtgccgttgccgcaggggctcgttcgcaagctgaagagcctggtggaccagctgtaagattgggagcgtgcgtcgggaaggcggctacagccgcgcgtggccgtccgcctgctcgggataatcgatcagcttgagcggcgcgaggtcggcgagctggcaggggtcgacgtcgagcgcgcggctcagctttacaagatcgggaatgctcaaggcgacgtagccgcattcgatattgctgatgcgagagtgctccgagccgatcatgagccccagctttttctgcgtcaatccttggtcttttcggatctgtcggaggtttgtcccaaggtcagacgcgtattttctcacaagggggtccttgcgttccatcgtctgctttttgctgagattacccatgcgtcaagcgtaacccgatgaatacgaaggcgtgtatccacgagggtacattggggcatatttatggaaaattcgccggtcgcttcaagattttcgccatcgcgtcgtttttcgttgcgatggcgcggcaccgccgtgcgtgatagaattatcctatgactatttgggcgcgcgggcggcgggcgcgcgggatggcgcgcgggtgcggggtgccgccccgcaaacgacgaggggaggcggcgtgctgagcgatctggtcgtgtgctacctgttcctcggcggcaccggggcggggctcgctctcgcgctctccgtgctcggcttgctcgttccgcacgcatgcgtgtcaacgcccccgggcgtgcaccttcgtccgaacgccgcgtaccgcaagctgctcggctcggggttcgccgccgcgttcgtgctgctggcgctcggcatcgtgtgcttgctggccgacctcggcaacgccgagcgcgtgatcctgctgctcctgcatcccacggcgtcgtacctggcggtggggtcgtgggcgctcgcggcgtgcctggcgctcgcagcggcgctcggcttcgcgtggcttggcatcggcacctggaacgtcgccctcgtgcgcatcctccaggtgacgactgcgctcgtggcggcggtggtcatggtgtacacggggctcctgctccagagcctcggcgcggtgcccctgtggtccacgccgtggctgccggcgttgttcgcggcctcgtcgctgtcgtgcggtatcgcatgcgcgctggcgcttgcccagctcacgggcgtggcatccgcgttcgatgccgtgctcggacgcttggcggcggtcgatgccgcggtcatcgtgatcgaggcgatcgtcgtcgcggtgttcgtgtacgcggcttcgctggccggcgcgccgctgtccaacggcaccgagctcgccgccgcgcagtcggtgcgggagctggtggcgggcgccaacgcgcagctgttctggggcggcttcgtcgcgcttggcctggcggtgccgctcgtgctggacggcgtgctcgccaagcgccgccgcccgctgccgggcgtcgccctgttcacggcggcgtgcgtgctggccggcgggttcgtcatgcggttctgcgttgttgcggctggtgctcacccggtgctcagctcgatgggagtgatgtgatatgtttccgttcgaagtggattcgaccaccgatgtgcctctgtgggtgcagctgcgtcagcggctcatctacctcatcaactcggggtacttcaagccgggcgaccagctgcccaccgtgcgcggcctggcctcggagatatctatcaactacaacacggtgaacaaagcgtacctgagcctcgtctccgacggctacctggaatcgacgcgcgggcgcggcgtgttcgtgcgcgacctcgacgccgagatggacgaggagtacacgaaggacgtcgacggcatcatgagcgactgtgtggcggcttgccgcgacttggggctgtcgctcgacgacgtgcagaagtgcatgatcaagaaaatcaagcagatcaagaaggacgagggcctcgagccgccgctcgagcggggcgacggcacggcgcgcatcgttccggtcgacgtgggcggcacggtacgtaagaaacaggcaggagcgtgatgcgggtgaagaccagacgaaacgaagttgagacggcgcggggcatcggcggtgcgcccgcatcgccctccgcgtcgtcgcacgcgcgctggcgcgtcgtccccgaggccagcaccgagatcgtgggcgagcgcgcgtcgagcaccggcgtgctgctgttctcggcggtggtgttcctgctgacctttggcctcgtgctgggcgcgtggtgggcgcttgcgggcgtgggcgtcgcggccatcgcggtcgcgctcgtcctcgcgctgctggccacggcggccgtgcacatcgcgcagcaatgggagaaggtggtggtgctgcgtttcggcacgttcaaccgcgtgtcgggaccgggcctgttctggacgtttcccgtcatcgagcagaacaccatgcgcgtggacacccgcgtgcgcgccaccacgttcggcgccgaagagaccctcacggccgacctcgtgccgctcgatgtgaacgcggtgctgttctggcacgtgtgggacgcgaaagcggcctgcatcgaggtgggcgacttcacgcgcgccgtggagctggcggcccagacggcgctgcgcgacgccatcgggcgcgcgagcgtggccgaggtggccatccgccgcgagcagctcgaccgcgagctcaagcgcgtgctcgaggagaaggtggcgccctggggcatcaccgtgctgtcggtggagatccgcgacatcctgctgccgaaggagctgcaggacgtcatgtcgctggaggcccaggccgagcagcgcaagaaggcccgcatcatcctcatggaggccgagcaggacatctgcgagatgatggacgacatgggcgagacgtacgcgaagaacgacgccgcgctgcgcctgcgcgcgatgcacctgctgtacgagagcgtgcgcgagacgggcggcacggtggtggtgcccagcagcttcagcgagggcttcggcgacgtgctgggcgatgccgcgaaggacgtgctgggaaaggggcccggcgcgggggcgtagcagcggccgcatgcggcacatgcgatgatcgagaacggatgtttcacgtgaaatatccgttctttttttgcgcgagaatgcgggtgcgcctgcgcgtcgtactatcctcaaaataatacaatcaaatgtaaataaattgtatacagtaccttgattgtcataggattatttactatagtactttaataggatttggccaattccatccagatgtccgcaggttccgttaggcgccggcggccatcctgacacgacgagcgacgctttgcgccggggcgcgagcgtgacgaggaggaaccatgtcaggtacgaacaggccaaacacgacgctgacccgccgcagctttctcagggccacgggcgccgcagccggcacgctgggcgttgcgggagctgcaggaatgttcgcggcagacgattggctcgcaccgaccgaggcgtacgcggagccggaggagcacgtcgcctacacctatcaccaggctcactgccgcgggcattgcatgctgaagtgcaccgtgcgcgacggccgcctgtgcttgatccagccgaacgacaaagccaaagagggactgcaaaccgtctgcctcaagggcctctccgagatccagcacgtctacagcgccgagcgcatccaaacgccgctcaagcgcgtgggcgagcgcggcgccaacgagttcgtcgccatctcctgggacgaggcgacggcctacttcgccgaggaagtgcggaagtgctgggacgcctacggcaagcagagcgtgttcgccagcatcgccatggagtcggaggtggcgtccgagctgggcaagctgctgagcgcctccatggacaccgtcggcggcatcgacgtgggctacgccaacggcctggctcccgtctacggcggcgccaagcgctccggccccctgggcgcggtgagcgcgttcaacggcgtggccgactggatgaattgcaagaccctgctgttcgtgggcgtcaacttcatcgagtcgagcctcacgcaaaccaaacccttcttcgacgcgaaggatgcgggcatgcacgccatcgccatcgacccgcattacagcacgaccgccacgaagtgcgacgagtggatccccctcgaacccggcaccgacgccgcgctgttcctcggcatgatcacgcacgtgctggacaacggctggtacgacgaggcgtacgtgggcgcgcgcacctcgctgccgttcctcgtggcgcaagccgacggcacgctgctgcgcgaccatgcggtcgacccggcggccgccgcgccggaggacggcgcagccaaccccttcctggtctgggacgacgcggcgcaagccgcgcgcccggcagcagatgtggagtctcctgcgctcgaaggcaccttcaccgtcgacggcgaaacgtacacgacggtgctctcgctgctcaagaagaaccagcaaggctacgacaccgcgtgggcgtcgaaggtcacgggcatcccggccgataccatcgagtcgctggccgagcgctacgccacgggcggacccgcgtgcatcgccgtgggctacggcggcaacgacaagtacggcaacgccgacatcgccggccatgcggccgggctgctggccgcgatcaccggcaacatcgggcgcgccggcggcggcgtgggctatcccggcttcggctacggcagcgccggactcggcgcgtggccgctcgctgaggacatgaagccctcgaccttggccgtccccgccttcgagctgccctacgtggacggccccgtcaagtgcttcatcggcgtgggcgaccagatccagcagcgcttcgccgacctcaacaagctggacgagtgggtgcagggcctcgacttcatcgtgtacgccgacgtgtaccacagcacgggcgcgcagtacgtcgatctcgtgctgcccatctgctcgcgtttcgagagcgacgaggcgcttggcggcgtccgctcgaacaagggccaggtcatgctgcgccagcaggtgctcgagccgctgttcgagagcaagaccgacttcgcattcgagcgcgagctggcccacgccctcggcatcgacgcttcgttgccgaagaccaacgaggagcgcatcgtgcgcatgctggacacggcgaaggacgcgaaggtcgcgggcatcacgctcgaggagctgcaggccaaccagggcgtgctgccgtaccgcgctccgtcggccgtgccgttctccgaaggcaaggttcccacggcgtcgggccgcttcgacgtgtacttcccggatctcgtgaaattcgaccaggcgctgcccgcctacgaagcccccgaggagacgggcgcggacagcaagctgcgcgaccgcttccccctgcagctgtgccagatgcgcacgcgcttccacatccacaaccagttctgcgacgccgaatggattcgccagtactccacggcggccctgcacctcaaccctgcggacatggagcagcgcggcctgaccaacggcgacacggtggaggcgttcaacgatcgcggcagcttcgcctgccccgtggtgggcgacgagtcggttcgcccgggctccgcgcgcatcttcgagggcgagtggtcgaagttcatgagcgccggcaacatccagaacgtcacgaatcccgggatatccgaccgcgggcgcgcgttgctgaacggcccggtcatcccgtacaacgacacgctcgtcgaagtgaagaaagcgtaggtgggcgccatgaccagattcggactcgccatcaacacagggcgttgcatcgggtgccacacctgcgccaacgcctgcaagatgcagaacaacgtgcccatgggcatgctgtggaaccgcgtgctcaccgagggatgcgacatcgtggacggcgccgtcgggcagtatccgaacgtgtcgcgcgcctaccttcccgtggcgtgccagcactgcgagaaccccgcctgcctgcgcgtatgccccacgggcgccacgtacaaggacgaaaagggccgcgtcgagatcgcctacgacaagtgcatcggctgccgcacgtgcatggcggcctgcccctacaacgcccgcgtgttcaactggaacgagccgcgccgcgaccccgacttcaactacggcgacaaggacgtgcccgtgcgcggcaagggcgtcgtggagaaatgcacgctgtgcaaggagcgcaccgaccgcggcgatgagcccatgtgcgtggtgtgctgccccacgaaagcgcgcgtgttcggcgatctggacgacccgaacagcgacgtgtcgcgcatcgtccgggagcgtcgcgccggcgtgctgctggaagaacagggcacccgcccgcaagtccactactacggataggggagcgccatgggaaccttcggaacctcgatgaaattcaaaaccgcctccgtcgtgctggccgtgctggccgcggcgggcgtgggcacgtggatctaccaactgatgaacggcctgggcgtgaccggcatgaacaactccacgtcgtggggcctctacatcacctgcttcatgttcttcgtgggcctgtcggccggcgggctgatcgtggcctcctcggcgtcggtgttccacatcgcgcagttcaagaaggtggcggtgccggccatcatcctgtcgacggtgtgcatctgctgcgccggcatgttcgtgctcatcgacctcggcggcatccagcgcatctggaacgtgctcgtgtcgccgaacccgatgtcgccgcttctgtgggacatctgcgtgatcacctgctacctcgtcatcaacgtcctctacctgtacttcatgacctcgaagcgggccaacccgcacgcggtcagcatcatctcgcggttcgcgctgcccatcgccatcctcgtgcactcggtgacggcgtggatcttcggcctgcagctggcgcgcgaggcctggtactcggccatcatggcgcccatcttcgtggcctcggccatggactcgggattggcgctgctgctcatcgtgctgctggcgctgcaggcggcgaaggtgttcgagctcggccgcaagctcatggccacgctggccggcctcttggccacgtgcatcgcggtcgacgcgttcttcatcggctgcgagctgctgacggtggcctacccgcaaaccgccggcggcacggagacgctcggcacgctgttcaacggcgtcacctcgcccttcttctggttcgagatcatcgcggggctgctcatcccgttctgcatcctcgtgttctcggccaaccgccaacgtccgaagctcgtgatcctggcctcggcgctcgtggtggtgggcgtgttcttcaagcgcgtgtggctgctgttcacggcgttcgtccatccgaacgtgtacggcgcgccgggcatctcctcggggtcgtcggccggcgtccatgccggcgccaccgacatctggtcgacgctcggcgtgtacgcgcccacctgggtcgagatcgtggtggtcgtcggcgtggtgtcgctcggcgcgctggcgttcctcgtcttggcgagtaagctgctgaagccgtcggacgagcccgaaaccgccccgcgcgaaacggccgcgcaagttgcctgatcgcgtctaacccgtgacgctggggaaggggctcctcacccccttggaggcggaagctcctcacttccgcctccgttccctggcgcacctcaaatgtttcacgtgaaacatttgttcccatgattccccggtgcgcgaagcgtgtcctgtgctatccttcgagcctcatacgaaggaggataagaacatgacctgcggaatcacaaaaaattatccataaaatagtataatgacgcctgaaaattatcctatgacaatccttgattgtcataggataatttcgtatagtggggccagtggaatttggccaattctcacgaggaagagggggtatcctcgcatgaggcttgttggtcggacggtgtgaggaccgcgcgaccggcactacggggatatcctgacgacatctttgaggaggagacatgtcaggaacgagcagcccgcacagcgggctcacgcgcaggagctttctgaaggcgacgggcgcagcggcaggggccttgggcctcgcaggtgccgccggcatggtcacggccgacaactggctcgcgcccacccaagcccacgccgaggcaggggaacgggtggcccatctttgccatcaattccattgcctgaccgggtgcaatctgaaatgcacgatccgcgacgagcgggtggcccttatcgagcccagcgacctcgtcgacgaatctcacagcaccatatgcctgcgcggcatcaacgaagtcgcgcacatctactccagcgatcgcctgcaaaccccgctccggcgcgtcggcgagcgcggcgagggcaagttcgagcagatcagctgggacgaggccatcaaggccatcgtcgatgccatcaacgaatcgcacgagaagcacggacccgactcggtgttcgtccgcaagtccaccgaagcatccatcggcttcgacttcatcggcgcgctgctgaaggccgaccaaggcggcgaatggggcctcgaccgcggccagccgaacggccagacgcccgcgttcggcgcgttcagctactgcccgtcgcgctccatctgggagttctccgacgccgccaccatcatcgaagtggggcacaacccgcttgaaagcggcatcgtgtggtcgcgtgcgctgatggacgcgaaggaggctggcacctacatcgccgtgctcgacccgcgcttcagcggcaccgcgtcgaaagccgacgcgtggctgcccgtgcgccccggcacggacgcggcggtcatccaaggcatgatccgcgccatcatcgacgagaagtggtacgacgaggagttcgtcaaagccaacacgtccctgccgttcctggtcgacaagaagacagggaaaagctatcgcagcgacgaggtgctgtgcccgaacccgacggtcgtgaccggcgaggatgcgggcgccccgtacgtgtgggacgaggcgagcaatgctcccaagctttataacgaggagggtgtgagcccggtcctcgaaggcagctggacggtcgacggcaaggagctggtcaccgagttcacgctgatgaagaagtggatttcggagtgctcgctcgattgggcgtccgagacgtcgggcatcgcgcaggatgtgatcgtcgagttggccgaccgctatgcgaacaacggccccgccatcatcgactacggcctgggcggccccgacaagtacacgaacgcggacgtgctggggcattcgatgtccattctcacggcgctgaccggcaactacggcaggaaaggctccggtttcggcttctacggcggcgtgggagccgacgacccggcggcgacgttgaattactggatgcttcccgaagagtacgcgtacaacgactcgggaatggccatgtacgacatgccgtacaacgagaacaacatccacgcggcgttgacgttcggcgatgcgttcacgcttgaggctgcgagcgccaacgatacgctgaactgggtgaagagcctcgatttcttcgccatcatcgacatttaccactcgtccgccgtcgactacgccgacatcgtgctgcctgcatgcaccaagttcgagtgcgaggaggacgtcaagcaattgcgcggaagcctgggtcacgtcatgctggcgaacggcatgatcaagcccttgttcgaatcgaagagcgatctgcagatcgaacgtctgctggccgcccagtggggtttggagaaactgctgcccgagagctacgaagagctcgcacgtttctcgctcgagggcgtcgacaagctcgacccgaacatgaagggcatcacctacgatgcgctgctcaagaacggcggttgcatgccggttgcgggcgcgggcgccgactaccgccccgatggccatgccgaccaggtgtacggcacgccgtctacgaagatcgagctctactacgagtacctgctggatcaggggcatcagttccccgtgtacgaagacgccaacgaggcgtacgagaagaacccgttgaaggacacgtaccccctgtacttcatgcagggcaagtcgcgctaccgcatccatgcgtactacagcgcctccccgtggttccaggaggatttcggcccctacgtcaacatcttcccgtccgacgccgaagagcgcggtatccagaacggcgacgacgtgaaggtgtacaacgatcgcggctcgttcgtgtgcaaggcgcatgtgaatcccagcctgcagccgggcgtgctgttcatggccgagaccacgtacacgaagtactaccaggaggggttccttcagaacgtgacgaactcggcgcgcaacgagcggtgccgcgagatgttccacggcccccagattccctataacgacacgctcgtccagatcgaaaaagcgtaggtgatgcgatatgactaagcttggaatagctatcaacaagacgcgctgcatcggttgccagacgtgcgctcatgcctgcaagatgcagaacaacgtgccctccggcatgcgatggaaccgcgtgctcaccgaaggatgcgacgtggaagacggcgcattgggcgagttcccgaacctgagcaggggatatctgccggtggcgtgccaacattgcgagaaccctgcttgtctgcgcgtgtgcccgaccggggccacgtacaaggacgacaagggacgcgtggaggtcgactacgagaagtgcatcggctgccgtatgtgcatggcagcctgcccgtacaatgcgcgcgtgttcaactggaacgacccgaagcgcgagcccgacttcaactacggggacaaggacgtgcccgtgcgcggcaagggcgtcgtggagaagtgcacgctgtgcaaggagcgcaccgaccgcggcgaggaacccatgtgcgtgaagtgctgtccggtcaaggcgcgcacgttcggcgacctcgacgatccgaacagcgagatctcgaagctcgtcgtcgctcgcaaggccggtgtcctcctcgaggagcaaggcacccgtccgcaagtccattacttcaattaaggaggaggtgcgcatcatgggaacctctacgaaaaccaaagctgccatcggggtgctgggcgcgctgacggtggcgggagtcgccgcttggatctaccagctgataggcggcctcggcgtgaccggcatgaacaacggcacgtcgtggggcctctacatcacgtgcttcatgttcttcgtgggcctatcggccggcggcctcatcgtggcctcgtcggccagcgtgttccacgtggccgagtacaagaaggtggcgctgcccgccgtcatcctgtcgacggtatgcatctgctgcgccggcatgttcgtgctcatcgacctcggcggcatccagcgcgtgtggcgcatcgtcacggggccgaacgtgacctcgcctttgttctgggacatctgcgtcatcacgctgtacctcgccatcaacgtcgtgtacctgtacttcatgaagtcgaagaagccgggcgcgcaggacaaggtggccatcgtgtcgcgcttcgcgctgcccgttgccatcctcgtgcactcggtgacggcgtggatcttcggcctcgagatggcgcgcgaaggctggtactcggccatcatggcgccgctgttcgtggtatcggccatggattccggcctggccctgctgctgctctcgctcatggggctcaacaaatccggtcgcttcaaaaccgataagaagctgctgtccaacctggccggcctgctggccacctgcatcgccatcgacggcttcctcgtgggctgcgaagtgctgaccatggcctacccgggcgccgccggcgccgagacgctcgccatcatggcgacgggcgccaccgctccgtacttctggttcgagatcgtcgtgggcatcctcatcccgttctgcatcctcgtgttcgcgaagaaccgcgcgcggatggggttggtggccgccgccagcgtgtgcgtggtggtgggcgtgttcttcaagcgcgtgtggctgctgctcacctcgttcgtcgagttcaacgtgatgggcgcccccggcgtggcctcgggctcgtcggccgcggcgcacgcgacggggctcgacatgtgggccgtcgccagctcgtacgctcccacctgggtggagatcgtcgtcgtcatcggcgtggtgtccctcggcgcgctcgcgttcgtcgtgctgacgcagaagctgctgcccgcccgcgcggcgaagcgcgaggccgtcgaggccgcggcgggcgaagccgcgtaaggcgcgcggccctcgcggctcgcgacggcttcgaccctctcgacctttccgtccgttggtccttggcgacgctttccctccccgcgtcgccaaggaccgctcccgttgcggtatgctgtacccgctgcaccccggttcacgttgcgcgccccgcgctgaaaggagtttttcgccatggcgaaagagattccctggaagaccttgtccgaagcctacgcgttcatcgggaactcgctgttgaagccgatgacgatgacgtcgacggtcgggttggatccggcattctgggcatcgttccccacgttcgacgacgctgccgtggccgaggtcgtggcggcgtgcgcacgctacgccgaggaggccgcccgccgcgccgaggcgggcgaggacgagccccagcgcgtcgccgtcgagtacacgaagctgttcgtggggccgccgtcgcccgcagcggcgccgtgggagacgatgtaccgcggccaggacgtgaccgtggggttcggccaggccacgttcgagatgcgcgagctgctgcgcgcggcggggctcgaggtgcggaacgagaacaaccagtacgaggaccacatgggcatcgagctgctgtacctctcgtcgcagtgcgcccgcgtggacgcaggcgcggaggacgcgcccgcgcccgacgctgtcgccgacttcatcgaggctcacccgctttcctgggcggaagcgttccgcgcgcgcatcgccgagacggccgcgcacggctacttcgctcccctcgtggggttggctcaggccctgctcgtctggcacgtgcaggcgctgcgctagcgcgaagccgcctcttgccgccgccgcgccggcgccgcgctcgtggtgaatacttgcatgtccgaaaacggctagtgctcgggcgcgctttgtggtttcatgggcgttgttgccgatgaacgcgaagggatgcccgtgatggagtacagcgatcgcacgtgctgggaggcgctgagcgcgcacgatgcgcgcttcgacgggctgttcttcgtgggcgtgcggtcgaccggcgtgtactgccgcgccgtgtgcccggcgaaaacgcccaagttcgagaactgcacgttctacgcgagcgcggccgaggccgaggcggcgggctatcgcccctgcctcaagtgtcgccccgagctggcgccgggcgtccccgtcgacgagggcgccgaccgcgcggtggcgcgggccgcggcgctcatccgcgaggggtcgggcgcatgctccatcgccgacatcgcggcgaagctggggttttccgagcggcagctgcgccgcctcttcgagcgcgcgttcggcgtgacgcctgcctcctatcgcgccacctgccgcctgctgctcgcgaaaagcctgctcaccgacaccgagctgcccgtcacgcgcgtggcgtacgcgtgcggcttctcgtcggtgcgccggttcaacgacgcgttctcgcagcgctaccgcatgcccccgagccggtttcgcgcccgagcgggcgccgccgcaagcgccgcggctcagggcgagggcggggaagggcccatcgtgctgcacgtgggttaccggccgccgtaccgcttcgatctgctgctcgagttcctgcgcctgcgcgccatcgagggcgtcgaggcggtcgaggacggcgcgtacctgcgcacggtgcgcctcgaggcggacgcgtcgagtccggacgcggccccgcacgtcggttggatcagggtcgccgacgagcccaatcgcaaccgcctcgcactcaccgtgtcccccgagctgttcgacgagctgccgctcgtcgtggcgcgcacgcgccgcctcttcgacgccgactgcctccccgctgcggtggaggccggcctcgccgacttccatgcgcgcgtgcccgccgcctcccgcatcccgggcgtgcggctgccgtgctgcttcgacggcttcgagatggccgtgcgcgccatcctcggccagcagatcacggtgaaggccgccggcacgttggccggacgcgtcgcgcacgcgttcggatcgccggccgccacgccgcacgcggcgctcacgacggcgtttccgcctccggaagcgctgtgcgcgcccggcgcggccgagcggctgggcgagctcggggtgatcggtcagcgcgcccgcgccatctgcgcgctggcgctgcgccccggagccgatctcgctgccgaggcccgcgcgctcgcggcgattcccggcatcggcccgtggaccgtgcagtacctgctcatgcgcgcctacggccatcccgacgccttcccggcgaccgacctggccgtgcgcgccgccttccccgagctcaagccgcgcgagctggcgcgggcctccgaatcgtggagcccgtggcgctcgtacgccgtcatgtccctgtggtcgacgccgcacggtcggcccgacgaaaccccgaacacgtaaggagcacctatggattaccttctcacgatggattcgcccgtggggccggtcaccgtcgccagtgacgacgaggcgatcatcggcctgtggctggaagggcagaagtacttcgaggccacgctcgaagctgccgaggagcggcccgacctgccggtgctcgccgaggcgcgtgcctggctcgagcgttacttcgccggcgacgatcccggcgcgcttccgcccgtgaacccgcgcggcaccgccttccagcagcgggtgtgggcgcagctcgccgagataccgtacggccagctgaccacgtacggccagatcgcgcgccgcctcgaggagcagacgggagcccgcacctcggcgcgcgccgtgggcagcgccgtcgggcgcaaccccatctccatcatcctgccgtgccaccgcgtcgtgggttcgaccggcagcctcaccgggtacgccggcggcttgcagaagaagatcgccctcttgcgcatcgagggcgtggacgtggaagcgctgagcactccgaagagggggacggcgctgtaaggggctttcccggtcgcgccgcggccccttcccattgcgccgcgaggacaacgagaaacggcccgtcacgggccgtttctcgttgcggtgcgggcgggccgcgtaccctagaagatcagcgcgccgtccaccgtcatcgaggtgacgttgccgtctgcgtcgcaggtgagcagcacgttcgtgacggtcgcgttgccgtcgccgtcgaggatggagacgtcgttggcgtactggtagccgccctcgacgggcgtcatgacggccgtggcggggtcgaagctctggtaggtgtagtacgtgttgtcggcgatgagcgccggcagcgcggcctcgacggctgctacggctttggcctgcggatcctcggcgggttcgggcgtttcgggctcggccggcgtctcgggctgcggcgtgggctcggtggcggccggggtctggtcgagcagccacgtggcctcggtggcgccgtcgttccagaacaggcgctgcgaggagtaccggtcgtcgaacgtgagcgtgcccgacgccgtttcgcctgctgccacggagatggtgccaccgtcgaacgtcgagctgacgggaggcatgccgaacgacagcaggcattcggtggaaagctgctgcgcgttcgcgtgcgccttcacgtcgatctgcacgttcagctggccgttcgtgcggtcgatcgacttcacggtcacctcgtagtcgcgccagacggccgactcgcccaccgagagcgccttgagcttggccgcgtcggtgatggtgtagccgctgctcgacgagctggcgttcgggtcgggcaggttgggttcttcggctttcgagccgcatccggtaagcgccagcgccaggaacgcgcaggccgcggtcgcaacgatcttcttgttcaacgtgagtcccttcattcggtgcgcgggcgcgcgggcgcggcccgattgcgtttccctcgtatcataccagttcggtcatcatgtgtaagtgccctgtgctaactgcacgccgaacattcgctctggcggaaacctcgcaggtgtggtttcataagcccagattccgaaaggggcgtatggacaccacatttctacagcaagcgttctccgattcccaggtgctcacggtgccttggagcatcgactacttctccgtcatcgtcggcgtgctgacgggcgccctgttcgcgtgcgaccgcaagctcgacatcatcggcacggtggtgctcggcctgctcacgggatacggcggcggcatcatccgcgacgtgctgctacaggaccacggcgtgtacttcacctcgcatcccgacctcatcctcatctgcatcgccatctgcgcgttcgtgttctacttccgcgggctgttccgccatctcgacgccacggtgttcttcgccgacgcgttgtcggtgggcctgttcgcgctcgccggcgccagcaaggcgttctcgctcgagcaggggttcgtgctgtcggtcatcctcggcgccatcacggcggtgggcggcggcgcggtgcgcgacatctgcgtgggcgagacgcccggcatcttccagcaatcgaacttctatgcggtggcgggcctcggcggctcgctggcgttcgtgatcctggcctacgggggcagcccgctgccgcttgcgggcgtggcctgcgtcttcgtcgtcgtgttcctgcggtattggagcgtgtacttcgactggaagacgcgcaacgaggccgacctcacgccgcatgtggcgcgcggggtggggaaggtgaagcgcgtcgtgtccggcgtgttcctgcacggcggcgacgccacggtggcgcagaaggagcgccggcgccggggtcgttggcgccgcagccgcgagaagcgcgactgagcgcgccgcccgtcgctgacgcgttcgcatgacgatacgctgaagaaacgcgcgtcggcgtcgccgatggctcgctcatctggcatactggccgtatcaacaacgtgccgtgcgatgccatgccaggatcgacgcggaagaatacgaaggatcgtggaacatggctgatttcatcgagggcaagcgccccgtcatcgaggcgctgcgcacgggcgtgcccattaagagcattctcatggccgacaacgtgcagcgcgatggcctcatcgaggacatcctgcgcaaggcgaagcgcgccggcgccaccgtggagatggtgccgcgcaaggtgctggacggcaagtccgaccgcggcagccaccagggcgtcatggcgaaggccgcgccgttcccgtacgtgggcatcggcgacgtgatcgacgcggcgggcaagtcggccgagcagcacgacggccgcgcgctcgtgatcatcctcgaccacatcaccgacgcgggcaacctgggcgccgtgtcgcgcagcgccgaagcggtgggcgcgtgcggcatcgtgatccccaacaagcgcagcgcgcacgtggaggcgtccacgtacaagagctcggccggcgccatcgcgcacgtgcccgtggctcaggtgtcgaacctcgtgcagaccatgagccgcctcaaggaggagggcttctggatcgccggggccaccgagcatgcgaaggacctcatctggaagtcgaacctcaagggcaagatcgcactggtgatgggcaacgagcaggagggcatctcgcgcctcgtgatggagcactgcgacttcctggtgaagctgcccatcgagggcgaagtggcgtccctcaacgtggcgcaagccgccaccgcctgcatgtacgagtggcttcgccagaaccagtaggacaacggcggacgcgcaggttgacgtaggtggatcatggccaagcaacgtaagaaactcctgatcgttgatggatacaacgtgctgcgctccggcagccgctaccgcaacgcgcccgatgaggactacaccgacgacacgttcaacgccgcgcgcgagatgctcatcaacgacgtggtgaactacgccggaggcgactacaaggccgtcatcgtgttcgatggcgcgaagaacgcgttctcggacggcgaggcggaaaccgtcggcggcgtgcgcatcgtgttctcgccggcgggccagtcggccgacaaggtcatcgagaagctggctcacgacgcgcgcgagcgccaggtggaaaccctcgtggttaccagcgacgccaccatccaggacaccacgttcggcttcggggtggaccgcatgagtgccgacggcttctcgcgcgaggtggggatgtactacgaggaggcgcgcctcgacgaaaccccgaaggtggctcagaagaatacggtggcctcccgcatcgaccccgtcaccctcgccaagctcaaagctctccgcgacggagcgggccggtaaccggacggcatactcgaaggtgacggtttcgtgaatctccgacacttggtcaaccgtgtgtcgggttacgggcagttctggcatcccttgttggttgtttcgctacacggtgttggttatcatgcatgatgtagggtaaccaagcgcgcgtatacgcgcaggcgaagcggacaggcgggcgggtatggatcgcatcatcgacggcatcatcgcgcgacgcaaagccgtcgtggcggcgtttttgaccgtcgccgtcgtgtgtgccgcgatgatcccgttcgtgggagtcaactacgacatggtggactacctgcccgacgaagcgcaatccaccacggccgtctccatcatgaacgacgagttcgcccaggccgtccccaacgccaatgtgctcgtccacgacgtgggcattgcccaggcgcttgcgctcaagcataagatcgccgaagtggaaggcgtcgagggcgtcatgtggctcgacggcgtcgtcgacgtcaccgtgcccctcgagatggccgacgcctccaccgtcgagacgtactatcgcgatggcgatgcgctgttccaggtcaccgtggccgaaggctccgaaagcacggccgtccccgcgctgcgcgccctcgtggacgaggcgggctcgggcaacgccgtgtcgggcgaggccgccgataccgcgcagaccacggccagcacgtcgaaggaggccggcggcgcggcgctcatcctcgtgcccgtcatcatcctgttgctcgtgctgtccaccacgtcgtggatcgagcctctgctgttcatcgccgccatcggcgtttccattctcatcaacatgggtacgaacatcgtgctggggcaggtttcgttcatcacgttctcggtgagccccatcctgcaattggcggtgtcgctggactacgccatcttcctgctgcacgcgttcgcggccgagcgtcagcgcacgccgaacgtggagcgtgccatggccttggctatgcgcaggtcgctgtccaccatcgccgccagcgccgtcaccacgctgttcggtttcgccgctcttgcgttcatgcagttccaaatcggcgccgatcttggcatcaacctggtgaagggcatcgtgttcagcttcttcaccgtcatggtgttcctgccggcggtcacgctttcgctgtacaagctcatcgacaagacgcggcatcggctgctcatgccctcgttcaagaacgtgggcaaggtgctgtcgaaggtgcgcgtcccggctctcgtcctcgtgttggcgctcgtcgttcccgcgtttttgggtcagagccacaccgtgttcacctaccagaacagcgagcccgacccgaacctgcgcgccggcgccgacacgcttatgatccaagacgagttcggccagcagaacgccgtggtggtgctggtgccgcgcggtgacgtggccgccgaggctgcgctttcgcgcgacctggccgaggtcgatcatgtaacgggcgtcatctcgtacgcgtccaccgtgggcgccgccatcccgcagggcttcctcgaccagagcgtgatcgaccagttctattcgccgaactacgcgcgcatcatcgcctacaccagcaccgatgtggaaagcgacgaggcgttctccacggtggaagccgtgcagcaggcggctgcgcgccattacgacacgtactacaccgccggccagtccgcgaatctctacgacatgaagaacatcgtggcggtggacaacgtggtggtcagcgccgtagccatcatcgccatcctcatcgtgttgctggtgacgttccgctcgctcacgctgccgctcgtgctgctgctcaccatcgagtcgggcatctggatcaacctgtctatcccgtacttcatgggcgagtcggtgaacttcatcggctacctcgtcatcaacacggtgcagctgggcgccaccatcgactacggcatcctgctgaccacgcattacctgcgtcaccgtcgacgcgtcccggcgcgcaaggccgcgcaccttgcgctgggcgaaacgttcccgtcgctgctcgtgtcggccggcatcctggctactgcgggcttcgcgctgggattctcgtccagcatgtcggcggtgtccagcctgggcttcctgctcgcccgcggagcgctgctgtcgctgacgctggtcacgtgcttcctgccggcgctgctcgtgctgcttgatcgcgttatccggcgcaccacctggcatgcgaacttcgcgcctgtcgcggctgccgagcccgcggtgcccgcagcgtctgaggttgtcgacgccgcatctcccgtagcggccgagggatccgaacccgccccgctccccgcgtccaaaggagacgaatcatgaaaaagcatccttgtctgcgcacctgcgtcgtcgcgctgctcaccgtgacgctgtccgtcgcctgcgtgccgagcgcgctcgcgctggccgagggcgatgcggcgagctcttcctctgcatctgccgcttccgcctcgtccgcggcgacgtacgagaagtccgaagtggtgtacgcgactttggcggcgagcggcgcgccgaaagcggtgtacgtggtcaaccgcttcgatgtggaggcgccgggcaccgtcgtcgaccacggcgactacacgaccgtgcagaacctcacgaacgagaccgagctgacgcgcctcggcgacgccaccacgttcgaagccgaaacgggcacgctgtactaccagggagacgctgcaaacgccgcattgccgtggaacgtgtcgctgtcctacgaactggacggcaagaagatggaggccgaccagctggccggcgcttcgggcaacttggccgtccacgtgaccaccgcgcgcaacgaggccgtcgaccccgcgttctacgatagcttcatgctgcagatcacgttcacgctgccgggcgacgtcgcctccgacgtggagggcgagggagccaccatcgcgcaatccggcgaagacgctacagctgccttcaccgtcctgcccggtcaggatgccgatttcacgctcacggccaaggtgcggaacttcaagatgccgggcgcgcagatcgccgcgctgccgtactcgtcggtcgtcgagatgcccgacacctcaagcatggtcagcggcatgacgaacctatcggacgcggtcggcgcgctggcggagggcacgtcgtcgctcgcctcgggcgtagacgagctgaccggcggcgcacaggatctgtcgtcgggcgctgcggcgttcggtcaggggttgaacaggctcaacggctcgtccggccagttggtgagcgcgtcgagccagatcaacgctgcgctgtcggctgtcgcgagcggtttgcagggtgctgatttgtcgcagctcgaccagctgaggcagctgccgggcgggctgaacgcgctcgcggacgggcttgcggagctgcgtcaacaggtcgttcgcgtccagcagggctacgcgcaggcgctcccggcgctcgagggcgccatcgaaggcattcccgccggcacgttgacagaagagcagatcggaagcttgatggcccttgcaagcacgtcgcagaaccccgacgacctcgtcacggtgaatcagctcctcgcgaactaccaggctgcccaaaccgtcaagggcacgtacgccgcgacgaaggacgccttctccggcgccgaccagctgttgggcgcgttggcggccgatgcgcaaagcggcggtgccctcgcccagcaagaagccgctctccgctccatggcgtccgcgctcgaaacggccgtgggcggcggccagctcgaccagctctcccagctcgtcgacggcatcgcgcagctgtctggcgagtacggtcggttccacgaaggtctcgcacagtacgcgtcgggcctgtcggcgcttgccgagaactacggtcagctcgagtccggcgcgaaccagcttgccggcggcgcgggccagctggccggcggggcgggcgagctcagcagcggcatgaaccagctcaacgcgtccaccatcacgctgcccgaaaccatgaagcggcagatcgccgacatgactgccgagttcgacttcccgaagttcgacccggtgtcgttcgtgtcgccgcagaacgccaacgtggaagtcgtgcagttcgtcatgaccacggccgccatcgagcagcctgaagcgcccgagccggaagagcccgagcaagagcaaaccatctgggaccgcttcctcgccctgttccaggggtagcgcgaacgggggtgtcggcgcccccgttcgtcacctctcgcgtatcccgatcgcctcgaacaactcggcgcgcagctcgaggtgcgcgcgcgtgtagcccgggtcgacgtagcgcaggcgttttcccaggcgcttcgccagctgatgcgccagccggttgaacgccccgctgtccatgacctgccccttcgacacggtgaccacggtgaagccgagcgtgataagggtgctgcgccgtcgcgcatcgctttcccgccgttcggggtcgacatggtgcagctcgctgtcgtactccgcggccagcttcgattcgggccagcacaggtcgcatacgcagtgcttccggtcggccatggcgcggaagctgggcggcacgtcgacgcggtagttaagtcgcggttcgggtaatccgtacccgcccaggccgtacggcaggcacagcagcatggccagcgcagactccatcggcgaggccgatcggtccaacacgtagtgcaaagcccgcagcgccttcttcctcccgcgagcgttcgaggcgccttcgacgaacgtccgcagcttggcgaccgtcgtcagcggcgcgtcgcgacgcggtgccggccccttgtctaccaggacgtacgttccgcacaactcgtatcccagcattatgagccgtgcgagcgacagccggttcgccatctgcaagaagcagaactccggcgtgctcatcaaaaagccctcgcccgcgtcgacgaacgacctctcggggaggacggagcaaaagctgctgagcacggcaggcgttctcgtccggacgtcgacgctgcccaccagcgtgcacaggggcagggtgcatccggcaggacgccgatttccctcggaaagggtcggtcgctcgcttgaagcgagcgcacgtcgcgcacgtcttgttgccgcttgccgcgcatcgtagccgcgcaagtaattcggccccaccgttctccagtggtcgagcgccgattcgtatccgataagtatatccatcaggtcatcgtaacataatctggcagagaatcacggtttgggcgcaactgcatcgcgattcctgcgtctgtgttggctgccgaaaaacctgacctggtgcttctttggatatctgggcttttggttggaggggagacattgattttgcgcctaaaccgtgattctctgccagaatgcgaaaccgcggccgaaaatccgtgtgcaatccggtctcgcgaacgatgacgctccggttggcgagggtgcttcgggcgaaactcggaaacgaggcgggcgcgtcggcgaaacgactcgcaacttcgcagcgggcgcgcggcgccgttgcccgatgctcgctcgcttcaggcgcgctcctccacgccgtgctggatcatgctcatcagcagctcggacatctcggcgggggattgcggcgtgcccttcttcagccagtgcgacagcatgcccagagcgcccgatacggcgaacaggtacatgtactccagatcgtcggcgtccaccgccgcatcctggtcggacatttgcaggtccaccagatgcgccagctccatgatctgccgctggaagccgccctcgctttcgtccagcagcatgaggaacacgtcggcgttctccttggcgtattccaggatcttctccacgttgcgcgtgcgcggctcgccgtcggccaggaggcgcgccttgagatcttcgagcgcctcggcttcgatgtacgccagcaggtcgtattggttgcggaaatgggcgtagaacgtactgcggttcacgtcggcggcggcgcacagcgccttcacggatattttcgagatgtggttctcgcgcatgaggtcgatgagggcgctcgtgagggcgcgcttcgtgtactgcacgcgtcgatcggtctttccggtttccatggacgcctccttcggctcgatcgttccagtataggacatgcgggacgcatcggcgccggccggtagccgttgcttgtcgaagcgcgcggggagggccggcgcgttgcgcagacggcgatgcgcgaggtccgaacgcgcagccgttttggaacgccggtatcgggggattcgtccgccgcttcgccgcagccaagcgcatcgaaggacgaccgcataaaagtcggcatgaccgatgtcatgaaatcccacttcgcaggcgtatgcaaccgccggttgcgtaaaatgataaccagacatgctggtgcaacgtgccgggcaaccgtaggctggtaatcgagaaggagcggacgccatgtccccaacgtcgaagaagggatcgttcatgaacgtcgagattgcccagcgcttagcagccatgcgacgcgagcaaggatacagccaggaggagctggccgaacggctcggcctgtcgcggcaggcggtgtcgaagtgggagcgcgccgagtcgtcgcccgatacgggaaacctcatcgcgctcgcgaagctgtacggtgtgtccctcgacgacctgctgcgcatcgacgacgacgtggtggacgacgtggcgttcgaggaaaaggacaaggacgccaccgccgaggcgcaggcgcaggaggccgccgtgcgcgccaacgaggccgccgtccgcgcggcgcaggcggccgtggccgcggcgcaggctcgcgcgacggccgaacaggcgcaccaggcccctccggcgcagccccaaccgcagccccagcccgtgcagcagccctactacggcgcggcccccatgccccagcagcctgcgcaacccgcgcagccgcaagcgccttacgctccgcaagcccccgagccctacgacgcccagttgcgccgcccgcgcggcccctggtcgacgttcccgtaccccgtgctttgcgtgctcgtgttcctcgggggcggcttcctcttcgggtggtggcatcccggctggttcgtcttcctgaccatcccgctgtactattggatcgcccacatcatcgaaaacgacccgaactatcgggcgaaccgacgctagcggaagggccgtatcatgacgaaactcacgacggcgtcgtacgtcaaaatcacgctcatcatcgcgctcggcttgctcatcctggggtccatcggattcggcggatgctcggccatgcgcttcggaatgcggggaggaacggaaatgggatcggcgaacgtggacgcggccagcgtcaagaacctcagcgtcaagtgggcctccggcgcggtgaacatcgacgtcgtggacgagggcgacgccatcgagcttgtcgagacggcgccgcgcggcatgacgaaggcgcagcagatgcgctggtccgtgaacggcgacacgctgtccatcgactacggcacctggttctcgtgcttcgcgctgggccgcaaggacctgcaggtgcgcattccgaaaagctacgcccagaacctgggcgccgtcgagatcgacggcgcgtcgggcgactacgacgtgaacggcctgggctgcgaaacgctcaagctcaagctggcctcgggcgatgtggacgggcagcacctgcaagccgacgagctgcgcgtcgacgtggccagcgggcagctcgacgtcgagggccgcttcgccgaccgcgtggacgtgcgcaccgcgtcgggccagacgcgcatcgtgtgccgggaggcgtgtccgaaaacaatcgacgcggatatcgccagcggctcggtgagcgtggccgttcccgagagcagcggcttcaccgctcgcatcgagaaagcgtctggtcggttcagcagctccttctcactttcgcagaacggcaacgtgtacacgagcggcgacggaagcgccagcatcaacgcgcgcctggccagcggcgagttccgcatcgacgccgacgactaggaagctcctcccttgccatcctgagcgagcgaagcgagtcgaaggatcccgtgcggcgatagccgtgagacttccagctgacgttgcgcgggatccttcgactccgcaccttcggcgctgcgttcaggatgacgacggcatgcttcgactcggtgtgtcgaagcatgccaagccctcgcccctttgccgtccgttttgcgcgagcggtgctataataccaatgaattgctgcattgcgacaatggggagttgcgggcgaggacgaggggcggggcggcgcgtgttcaacgtgctcacgacaagctatcttttcctgggaggaacgggagcgggcgccctcgccgtcctgtgcgtgctcgagtgcgcccgcgtgctgcggtggcgcgcgctggccatgccggaggagttcttcgcccgggcatggccgatgtgcacggtgacgctggcgacgggcatgctgtgcctgctggtcgacctggggcgccctgaccgcctgctcggcctgttcgcctcgcctgcgccgtcggtcatggcggcggggtcgttcgcgctggtcgcggcgttggcctgtgcggcggcgttctcgttgggcgcgctgctggacaccgtgcgcctgccgcgtgcggcggttctggcgcttgcggcggcgggcgcgctgtcggcggcggtgaccgcgacgtacaccggcgtgctgctggaaagcctcgcgtcggtgctgctgtggcgcacgccgctcgtgccggtgctgttcgtgctgtcgtcggcatcgtgcggcatcgcgacggcgttcctggcagcctcgttcgtggagacgcggcacccgcaccgcgggccgctcgtgtggctcgcgcggattgacggcggtatcgtggtcgtcgaggctggctgcctggctgcgttcgtgctgctcgcgttcgcgggcgaggagacggccgcggctgctcgggcgctcgcgttcggcgagctggcgcccgtgttctggggcgtgctcgcggtgtgcgggctggccgtgccgctggtgctggagcgcttcctcacgcatgggaacagccgcacgcagcttctgtggatagcggcgctgctgctggtgggagggttcgcgctgcgctggtgcatcgtcggcgcgggcgcatacgatgtgacgcagatgccggaagcgctgtacgggctttcgacgttcgggcttacgggataaggagcgagtgcgatggcgagacgacgggcaggcgagcggttcgtgaaggacgccccctacgacgtgcgcgacaaggatgccgagatcagggcggccacgtcctacgtgccgcgcaaatcgtcgcgcaacggcgcggtcatcttcaacatcgcgacgttcatcgccacctgcgccgcggtgctgggcatcgcgtttgcggcgacgggaggcgtgggaatcgaggcgatcgttgccatgctgctggcggcgctgctggtgctgtcgtccacacacatcgcgctgagctgggagaaggtggtggtgctgcggttcggcaagctgaaccgcgtcgtggggccgggtttgtacttcaccatccccgtcatcgagcacggcaccatccgcgtggaccagcgcaccatcgccacgcccttctatgccgagaagacgctcacggccgacctcgtgcccgtcacggtagacgccgtgctgttctgggtggtgtgggacgccgagaaggcgtgcaccgaggtggaggactactacgcggccgtgtcgttcctcgcccagacggcgctgcgcgaggcggtgggccgctccacggtggccgaggtggcgctgcgccgcgaccagctggacgccgagatcaaggacgacatcgagaaggaggccgccggctggggcgtggacatcatctcggtgaaggtgcgcgacatcgtgatccccgacgagctgcaggaggtcatgagcctggaagcgcaggccgaccgcgagaagaacgcgcgcatgaccgtggccggcgtggaagccgagctggccgagatgctggccgaggccgcgcgcgtctacggcgacccggaggcggcgctcaagctgcgcaccatgctcatgcagtacgacacggtgaagaaatccaagggcaccgtggtaaccgtgcccaccgcgatgagcgacggcttcacggatagtgctatgatgaacggcgaccgaactactgagagataggcttccatgaacccgctcgcctcattcgaactcgactacaacagcggcctgccggtgtggatccaggtgaagaaccgcatcgcgtacctcatcggctcaggcgagtacaaagcgggcgaccagcttcccacggtgcgctcgctggccgtcgacctcgatatcagctacaacaccgtgaaccgcgcctacatggatttggaacgagaggggtacatctccacgcgcaaggggaggggcacgttcgtggccgagcgccacgccgtgggcgccgccctcgccgccgacaaccccgtcgagctgttggcggacgacctgatccgcacctgcgccaacgccggcatggccgatgacgacatcctggccctggtccaagcccggctggcccagaaaagcctgacgcgggcgtaggcgacccgcgcgccgagcgggcgcacccccgtcatcctgagcgcaggcggcgaagggttctgcgcagctcgtcatcctgagcgcagcgctgcaagcgcggagtcgaaggatcccgtgcggcgtcagcggcgtgcctcgcaacccctgctctccgtacaaaacgcggaggataattcgacattctccgcatggccgatttcccaacttgtgacaaggtgtcacaatgccggtttcgtccaggtacagatgtttcacgtgaaacatctgtaccgtatcgcttgatgaaccgataaatatcctaccgtttccagcatcatttatcctcgaagtaggcatgtttattagattgattgtcgcaatgcattgtgataatgtgacagtcacaaggatttggccaattcttatcaggagcaacagggggatatccgataagagtgcgcttggggacgaggggttcgaaggcgttgtgcgaaagacgtctgctcgtcgagccgttttcccgacgccatccgcaaaggggatatcctgacacgatctttgaggaggaaagatgtcaggagcaatcagctcgcacggcgggctcacgcgcagaagcttcctgaaagcaaccggcgccgtcgcaggcgcggctgccgtgacgggcgtcgcgacgccgacgctgcaggcgttggcggccgattacgaatcaggtcaaaaagagagcgagcaggaacggatcttccgcggagtatgccgtcccaactgtttcgcgttctgccacttgaacgtgcatgtgagagacggaaaagtggtcaaaacctcgcgtgctccgtacaacgagaaatgctacgatcgcatttgccagcgaggactttcgcatgtgcatagaatctacgatccggcgcgcttgcagtatccaatgcgacgcgtggagggaaccgaacgcggtgcaggcgagtgggaacgtgtgagttgggacgaagcacttgacgagatcgccgggaagatcaagtctatccagaccgaatttggcgagagcgccgtggcgttccttaccgcttcaggcaatcagtcgtgcgcgatcacgagcgcgtacggccgactttcctctcttatgaatgctagcagcatcggcgcttgcctcgatatgggcagttattacggcatgcaggcggttgccggcttgtacatcagccctttgatgggtctgcagatgtgggaaggcaatgagccgaccgatgccaagaacgcgaagaccatagtggtgtggggcgccaatattaccgacgcgcaggttcagaactggcacctggtcaaggaggccatgcagggcggcaccaagctggtggttatcgatccggtgtacacgcagatcgcctcaaaagccgacaggtggattcccattcgccccggtagcgacacgctgctgaagtacgctctcatgaacgtggttttggaaaaggacgcgcaggatgtggcgtatttgcaacagcataccgtcgcaccgttcttggtgcgcagcgatacgggcatgttcgtgcgcagaagcgacaccggcatcgccccggttcccaccggcgtgatgaatcctaccacgggcaaggaggtcatggacgatccgtacatggttctctcgaacggcgaactcgtttctgtcgacgaaacgtctgcgcccgacatcgaaggatcgtacgagctcgacggtgtgaagtgtcgcacggcgtatgcgctgctgaaagaggagatcctcgatcattcgcccgagaaggtttcggagcttaccgaagtatcggtcgatgacatttacgagctggccgaaatctgcatggacaccccggtgtaccactatgaaggctatggtccccaggcgtacaacaacggcggccataccacgatggcgggtcttaccctttgcgccctgttgggcaatttgggcaagccgggagcttcttacggtgcgttctggggcgtccatatgggggtcaatcccgcgtatgctgcccccaacggtcccagcacgggttttgccattcccagcgtcgacctgaagaacgtggtggaaaccggcaagttcggcggcaagcccgcgcagatcaaaatgctgtggatgtattcggccaatccgctgaacacccacaccgacacgcatgcgtggaccgatgtcattattccggctatggaatacgtcgtggtggcggattcggtcatgaccgattccgcacgctacgccgacatggtgcttcccatcgcccagtggttcgaactggaggaggttgcgaatgcgggtcagtgctcctcgctgcactacagcgagaaggctatcgatccgctttacgagagcaagcccgatccgcaaatcgtgacggagcttgcgcagaagctggggctcggcgattatttcaagcttgacaacggtggaatcctcgaagaaatgtacgacaccgatatgggcaaggccctgggtatggacatgggcaacctgcgtgaaaaaaagcagatacgcttcattcccggagatgcggagacggatccccatatcgcgtatgcggatgggaaattcggcacggcatcgggtcgcttcgagttctatcgcgagatgccgatgcctcgcgcggccactaccaagacgcctactcctgaagagatcgatcgcgagcgcatggctcgctggttcccgccgctcgaggcgtggccggaaaacgagttgtacaaaaagtacccgcttgttctcatgagcgagcgtccccgataccgcgttcactcccaatggttcagcacgccgctgttgcgcgagcttgatcccgagccgtacgtgaagatcaatcccgccgatgccgaggcgcgcggcatttctgacggagattacgtcgagtgctacaacgatcgtggcttcgctgttgccaaggcggtgtattcgcaagctattcgacctggcatgttggtgtatcccaagggatggcagctgtcgcagcataaggcgggcggttggtcggagctgagctccacggagttcgatgtgttcgcggtgaacaacaacttcatggacgtgctttgcgagattcgcgtgtggaatgaagggggtgctcgataatggccgagcggctgggtatggtcatagatatgaaagggtgcgttgcctgcgcttcgtgtgcggtggcgtgcaaagtggagaacaacttgcctgacggtgtttggtggaaccgcatcttgacggatggcggggacaatcccgacactccggcgggagcatacccgaatttgacgatggagaatatcgctgttgcgtgccagcattgcgagaatcctgcgtgcgtgaaggtgtgccctgttggagcaacgtacaaagatcctgaaaccggtgcggttcgtcaggactacgataagtgcatcggttgccgcatgtgcatgtcggcgtgtccgtacacgggcgttcgctcgttcaactgggaagagccgaagcatgcgatcggccatgctatgggcgatgccgacgtggcgacgcatcagaagcacgtggtggagaagtgcacgatgtgctggcatcggctggcgaagggtttgcagccggcttgcgtggaggtatgtcccggacgggtgcgcttcttcggcgatttcaacgatcccgaatccgaggtgtcgcgccttcttcgcgaacgcgcccataagcagcttttgcccgagcgcggcacgaacccctccgtctactacctcgtttaagcagaaagggagaatgaaatgtctgagaacactcaggcggcgcctgccgccaaggctcctgctgccagattcgggggcaaggggctcaacatcggcatcgtcgtggcggcggtcgtcaccgtcgcggggctggccctctggggcatgcagctctccggcggcctcgtccaaacgggtatgcgcaacttcgactcgtggggcctctacatcactatgttcatgttcctcgtgggtctgtcggccggcggcctgatcatcagctcggtgccgcgcgccttcggcatgaagggcttcggcggcatctcgaagatcgccgtgtggacgtccatctgctgcacggtgctggccgtgggcttcgtggtgatcgacctcggccagccgcttcgcctgtgggagctgttcgcgtactcgaacctgggcagcccgctcatgtgggacatcgcggtcatctcgatctacctcatcctgtccgtcgtgtacctgtgggcgacgctgcgcgccgaggcgggcaaggtgtcggagaaagccctgcgcgtgatctcggtcgtcgcgctggtcaccgccgtgctcgtgcactcggtgacggcttggatcttcgggctgcagcaggcccacgagttctggcacaccgccctgctcgcgccctggttcgtgtcctcggcgctggtgtgcggcgtggcgctggtgctcgtggtggtcatcgcgctgcgcaaggccgggtacctcgagctcgatcaggccaacgtcgtcaagctcgtcaagatgctgggcgcgttcgtcgtcgtcgacctgtacttcttcggctgtgacctgctgaccgccggcttcccgggcggctcgggctccgagatcgtcgccatgctcgcaaccggcccgctcgccccgttcttctgggtcgaggtcgtcggctgcgcgctgtgcgccgcggtgtgcttcacgccgaagctgcgcacggacccgctcgtcgtggtcgccagcctgctggccattgtcggcatcttctgcaagcgcgcgcagctgctggtgggtgggttccagatcccgaacctggactacgccggtcccatgacgcagtacacggtgaccgactgggctaccggcatgacaggcgcctaccagggcatggtgtattggccgacgccgatcgagttcggcatcgtgctgggcgtggtcggcctgggcgccctgctcctgctgctgggcctcaagtacctgccgctcaagccggttgatcatgaccgctgacgcggacgcttcggaaggagcgcggcttcgcgcgctccttccttgtctgacgaggtgaagccatgttcaagaaactgctcgtgacgcttgtcgccttcctgcttgcgggcgcgtgcgtgctcgcggcgggtgccgcggccgagcctgcgacgggggtgcggccgatcgaggccgattccccctgcccggccgtcgggtgcgcgtcggggtcgtgccacggcttcgacgacgtgcccgagcccgacggcgtccacgagatgacgtgcccggaggcgtcgtgcgcctcgaccgagtgtcatgcgtgggacacgctggccacgcgctattaccaggcgtccgacgcgagcctgaacctgtgggtgcttgcgcccgtggccttggtcgtgggccttgtgctgatcgtgcggaaggtggggtgatgccgtatggataggaagcttctcgccgtcgatgcggcgtgcttgctggtttacctggtcgcggcgagcccggctctcacgggcatcggcatccacgaatggctgggtctcggcgtgctggtcgtgttcttcgcgcatgccgcgatgcatgtcgactgggccgtcgaggcggtcaggtctgcgttcgcgcggccttcgtgggcgcggacggggaaccttgcgctcgaccttctcatcgtcgccgcgttcatgatggtgacggtgtcggggatcatggtgtcgggcgcagtgctgccggcgctggggctgtacgcggacggctactacttctgggatccgctgcacgcgatcgcggcgaaggcgctgctcgcgctgctgctcgtgcacgtcgtggcgcattggcgctggctggccggtttcttcaagaacgggaaaggggaacgtcatgggaaatgaagttgcggacgcgagcgtctggcaagcccgcgccgccgcctgggagctcgcggcgctgagcctgcgctacccggacgcggagctggccgaagccgcggcgggcggcgagtgggacgaggcggcgggggagatcctggccgcgctgggcctgcccgcggaggtccccgcggcggcgggcgatcccgcaggccctcccgccgcccgcgcggccggcgccgaggccgccgcgggcgccgacgcgctcctgcgcgccctgcgcccggaggccacgcgcctgttcgtcggggcgcccgagcccgcctgctcgccctacgagggcgtgtgggccgccgaggccgacggggtgcagccgcttctgttcgtgaacccccgctccatggaggtagagcgcttcatgcgctcctgcggcctcggccgccccgagggcaccaacgagcccctcgaccacgtcgccacggaatgcgagctcctggagcgcctggccctgcgcgcggccggagccccggcttccgagggcgccccggacggcgccggcctccctggagggagcccggccgccgcctacgagaccttcctctccgggcacgcccaagcctggatgccagccttcgccgagcgcctggccgccgaggcgcgccatcccttctaccgcgcggcggcggcctacttgggggcgctcgtcgggtaggacgttgccaaaccggccgattccagccatcttgctgcgagtctctgaccaggtaaaacaatgtatattacctggtcagaggtgtgacaaaaaatgactgtattggtaaccggctgttcggccgcttcgtctcgcgttcggtcgaggcggcgaaatccggtagagattcacggttcaggcgcagatcggggtgcttcgtggcttcgaagaagcctgataacgcggaaatccctggtaaagcatctcgatgtcggcctatgtcgtgcccagtccgtgattttctgccatattctgccgacgcaatcgcacgtgcgttgaaagcgcgaagtatttggcgcgttttggtcgtccgttgtgtggccgccgctcgcggcttacgcgttccagatgacgcacgccggttgtggcacgtccacgcacgcgaccgctcgcagcatcccgtcggcatcgcgttcgaacaggcgcacgtcgtcgctcgcgaggttggcgacggccagaaagcgcccgtcgggcgacggcgaaaagtgccgcggccccttccctccggacgcaacgtcgcagcgccccgcaacccgtccttggtcgtccaccgggaagacgaccagctggtcgcttccgcgcaccgacgcgtacagttgccgcccgtcgggcgagaacgcgatatgcgccgccagcgcgtcgccgcttggcgcctgcggcagactcagctgctcgacgatccgccaatgcagcccgccttcgtcgatccggaacaccagcacgtcgcacgccagctcgttcaccagcgcggccatcggcagacgcgggtggtacgccaccatgcgcggccccgaccctgccggcacgcgcacggtttccgcagccgtcggcgcgagcattccgcacgcgtcaacctggtagatcacaagcgcgtcgagccccaggtccacggcgaccagcagccgcgttcccggcacgaagctcagcgagtgcacatggggcccctcctgccgatcgtcccgcagaccgcgcccttcgtggcgccgcgacggcacgcccgccgccagacgcccgtcgtccagcagcgcgcagcaggcgacggatccgctcaagtagttcgccccgaagaggttgcgtccgttcggatcgggcagcacgaagcacgtgcccgcatcgtagggcgccgtgcacgctccgcggcaggtcagcgagccgtccggctcgatggcgtaggcggccatccgcccgcaggagtccagctcgtgagcggcgaacagcagcgatccgcgctgcgccagataggttgggttcgccccgcagctgtccgcgcgcacgacgtgcgcctcgtcgccgctttcgtcgaacgcgatcgtgcggataccgccgcgatcggcgccgtcggtgtagctgccgacgaacagccgccgcagggcgggagcggcatcggcgctcatgagcgctcctccgccagctcctcgcggttcagaattccgaagcggcggtacagcggcagcgtggcgaaccgattccacgccgtgatcaacggtccggtgaagaacgcggcgatcacggtgaacacgccgatgggtccgcccgccagcaccgccaggacggtcacggagatgtcctgcgtcatgcggcacgccgtgtacgagaagggcaggcgttcggcggcgatgggcgcgacggcgtcgatgggcgccacgcccatgcgcgtcttcaggtacagcgacacgcccagcgtgaacagcagcgtgccgatggccagatgaacgcctgcgctgaccaggccttcgaacttcggcagaaagccgagcagccacgtgaacagctcgatgaggtagcctacgcccaccatgttgatgagcgtgcccaggcctatctggtacttgtccagcgcgaacaccgctgccaagatcgccaggttcaccagcagctggaacgtgccgaagtccatgcccacacgcgcgctgaaccccaggttcatggcggtgaacgggtcgacgcccacgtttcccacgcggcacaccgtggtgcccagcgcgatgcacacgacgccgaggcatgagagcagcagcttgcctttgaggttgtaggtgtggcgcaggtccatccatttcgccatgagccgtcgcctttcttgcgggaatgattccgtcgattcgccaagtatggccggggaggtccgtaatcccggcgcgcggccgctttttgtgcggaacctgtcagggcttcgccatgcgcccggcacgcagcggggaagggcggccgtcgactggcgcgacccgtcccgcgtatgacacgttgtcatatcaaacgcttccgttttgtgcgatactgaccccagcgcaaaagcgctcgggcgcgcggaaggcgaaggagggggacgatgttcagcgttttggcggtgggctatctgttcctcggcggcgcgggcgcgggcgccatcgcggttgcatcgatcctcgatctcgcgtgggtgaaggctccgttcgggcatgcatcgcgcatcggcatcggggaggctacgccgcttgagcgcacggtggccgtcggcatgctcgccgggttcggggcgctcgcgctcggcatgctgttcttgctgttcgacctcgggcgcatcgatcgcgttacatcgcttctgctgcggccctcgctctcgtttctcacggtgggcacctacacgctcgcggggctggcggcatgcgcggcgctgctggtggccgtgcggttcgcctatctgcccagcgtgccgcgcggagcggtccgagccgtcgaggccgcggctgcggtcgtggccgtcgtggtcatgctgtacaccggtttgctgctgcagaatacgggcgcggtggccttgtggagctctccgctcgtgcccgtgctgttcctgctgtcgtcgctttcctgcggaatcgcggcgcttctgctggcggcgtacttcgcgccggcggacgcgggcatcgcatggcttttccgcacgctcgcgcgcgccgacgccgtgattgtcgtgctggaagccgtggccgcggcgctgttcgtcgcgttcgcgctcgccgacgatcatccgggggcggccgcgtccgcgcagcgtcttgcggagggcgacttggctttgtggtggtgggtgggcttcgcgctgtgcgggctcgtcgtgccgctggcggtggaaggcgtgctgtcagcgcgcggctccttctccgaggcgtgccgaacggggctggccgtggcggccgtgctcgtgctggtgggcgggttcagcatgcgcaccgccctggccgaggcgggatcgcatcgcgagctcgcgctggaaggcgcggcggcggagcaaacgtccgaaggcgagccgaccgggctcgaacttcgattggaatagaaagaacggacacgtggccctattcgagataaacgagaagagcagcatccccatctggctgcagctgaagaaccggttcatctacctcatcacctcggggtactacaagccgggcgaccagctgcccaccgtgcgcggcctcgccgcggacgtcgaggtgaactacaacacggtgagcaaggtgtacatgagcctcgagcaggacggctacatccagtccaaacgccgccagggcgcgtttgtcctcgatgtgtccgacaagccgggcgtcagcatctcgtccacggccgagatcgtcacgagcgagtacctcaagcgctgcttcgagctgggcatgtcgctggaggacatcgagcagcagttcgcgctcagcttgaacgaagcgaaaaccaagcgggacgcaggctaaaggccgcgcccgaacgcgaagggagatcgaacgatgaaacgcgacaagcgagcaggcgcggaagcgggcgtcgggccgacggggttctcgacgggcgccatgcccgcgtattccgacggccgcggcgcccccgacggcatccgctcggtgaccaatcgcagccgcgcctcgcgcaacggagccgtcgtgttcgccgtggtggtgttcgtgctggcgttcggcatcgtgctggcggcggcgcaggcggcgttcgcggagatcggcctcgtcgccctcgtaagtgcggccatcgtcgggtggctggcatcctcgtcggtgcacatcgtgttggagtgggagaaggcggtggtgctgcgcttcggcaagttcaaccgcgtggcgggccccggcctcgtgttcacctggcccatcatcgagttctacacgttgcgcatcgatcagcgcgtggcaaccacgtacttcggcgccgaggagacgctcacgagcgatctcgtgcccatcaacgtggatgccgtgctgttctggatggtgtttagcgccaagaaggcgtgcgtggaggtggaggactactcggccgccgtggcctgggtggcccagacggccatgcgcaaggccatcgggcgcgccaccgtggccgaggtggctatgcgacgcgaccagctggacgccgagctgaaagacgccatcgaggagaagctcagcccctggggcatcgacatcatcgacgtggaggtgcgcgacatcgtcgtgccgaaagagctgcaggaggccatggccatggaggccgtggccgagcgcaagaagaacgcccgcatggtgctggccgaggccgagaaggacatctccgagatgctgaaagatgcctccgaagtgtacgccggcgatcaggacgccatgaagctgcgcacgatgcatctggcctacgaaagcgtcgagcagtcgggcggcacgctggtcatccccagcgccttcagcgagggcttcgcgcctgaagccgggggtgcggcgaccgcgggaaggcccgcagcgggggagtagcgcgggcttcgagcggcgtctcctaagtgcgcaaaggagctccttggttgaagggcttcaggccagtggcctcttcggcagcggccaacatgcgagccaaaggtgcgaaacgcgccgattttggctactatatgagctaggctgcggccgaatgccgcagtcggctctcatgccataacctccatgataaccctttatactcccagttcaacctctatatcctcaaaatagtataacttcctgtcatatcctgtcatacattattattgataatcatagtgacatatggcagactatgacaagaaggaatcggccgattctgatatgagggggaatatcggaacctgtattggagcgcacgcgcacccatgcagccggagggggatacccgtacgcggaacactcaccttcttacgatgatccccaggcattctgcaacatgaatggaggaggagacatgtctgagacgaagagcccgctcggcggactcacgcgtagaggcttcctgaagacgacgggtgccgtcacggccgtcgcggctgtcgcaggcacgggcgctgcgctggcgccgatgccggcgaatgcggagggaagttcatccgccgatggcgagcagacgttcaggagcgcatgccgcggcaactgcggtagccgctgccccttggaggtgacggtgcgcgagggcaaggtggtcaaagcccgtcccatggatatgcccggcgaggatgccgtccgcaagcgcttctgcgtgaaggggttcagccagccgcagcgcgtgtacgataccgaccggctcaagtaccccatgaagcgcgtcggggagcgcggagcgggcgagtgggagcgcatcagctgggacgaggctgttagcaccatcgcggagaagatgggcgcggctatcaaagattacggtggcacgtcggttgccgtttggtcctcgtatggttcgtacggcgttctgaacggtgcgatggcaggctacatgtccgttgcctacggtcgcttcatcacggccgtcgggggctcggtactgggagccggtgccgatacggcgcagcagcatgagcagtcgacgctgctggggatttcgggcaacgacttcgtggatgccgccaacgccaagaccattatctcgtggggcggcaatccggcggaagcgtacgtgcatgcgtggcagttcgtgtgcgatgcgcgcgagaagggcgcaaagctcatcaccatcgacccgcagttcaccgcgtcggccatgcactccgacgtctacgttcccgtccggccgggcaccgacggcgcgctcatgctggccatggccaatcatattatcgagaacggcttgatggacgaagaattcatgcgaagcagcacggtgtctccgttcttggtgaaggaggacggcacgtaccttcacatgagcgatctgggcacgcctgccaccgagggaccggtcgatccgcgcacgggcaagcccaccgtgatcgatccggttgcggtgtgggacgaggctgccggcgcacctgcgaccgccgatgccgcgcagaagcccgccatcgaaggatcgttcgaggtgcagggtttcgccgtgaaaccggtctaccaagttgtcaaggagagcatttccgaatacaccgtcgagagggctgcggacatttgcgacctcccgaaggagcagatcgaggaactggcccgcgtgtatgccaccgaaggccccgtgtacgtcatgacgttccagggactcggacaccatgcgaactcccatcacaacttcaagaacctcgcgttcctcgcggctctgaccggcaacgccggcaagccgggcgcttccatctgcggcagcccatcgacgggcatggtgggctacaacgtgaaagcctacatgttgggaactcccggtgccagcttctgcggcatgtacctcccgaaggtcatggaggagaaaaagtgggcggggcaggatctcgagattcgcgttctgtggtgctgcaacggcaacatgctgtcctgcgagtcgggccgtcaagacctcatcgacgctgtcaagaagatcgacttcgtggtgtgcgcagacgtcaacatgaccgacactgcgcagtgggccgatatccttttgccggtgccccattcgttcgaggtgcaggatttcgacccggtgtgctcggtgccgtatcccacgttcacccagaaagtgctcgaccctctgtacgaatgcaagaccgatctggagatcatgcgtctggtgaccgcgaagatgggcatggacatctacccgaaatcggacgatgatttcttgaaggaagtcatcgataccgaggccaacgtcaagcagggctgcacgttcgacgagctcaagacgggcaagctggttcgcgatgcttcttacaccgagtcgcgtatggtgccgaagttcggcagcgccgaggcgcagcgtttgaagtactacctcgagaagcccacgccgcgcaacaacttcgggcagaagatcgccgattgcgagcgtctgccttactacgagcacgcgaacgaggcatacgaggagaatccgctgcgcgacaagtatccgctgttcggatgcagcgagcacagcaagtatcacgtgcattcgcagctggcgtacacgccggtcatgcgcgagctcgagcccgagccgttgctgaaggtcaacgcgaccgatgccgccgagcgcggaatccagcagggcgactacgtgcgcgtctacaacgatcacggctatgccgtgctcaaggcgcgtgtgaccgagggcatcaagccgggagtcgtctccattccgcacggtttccaggctagccagtttgtcgaggggcatacgcaggatctgacgaatgtgtacatgaacgatttctgctcgaacagcgccttctacgacttcctctgcgaagtcgagaagtacgaagggggtgtgaggtaatggcccgctacggcatggtcatcgacacgaagcgatgcgtggggtgcaacgcctgctccgtgaactgcaagataacaaacaaccttcccgagactaattggtggacccgggtcctcacggagggcggcgacgagatcgacacgccggccggcgtcttccctgacgtgtcgatgcgctatatcactgtaggctgccagcattgcgagaacccggcttgcacgaaggtgtgccctgtgggggcaacctacaaagatcccgagacgggcgtcgtgcgtcaggactacgacaagtgcatcggctgccgtatgtgcatggcggcttgcccgtacacgggcgtacgctcgttcaactgggaggagccgaagtaccccgtcgaccatgctgtcggcgatgcagacgtcccgaagcaccagaagcatgtggtcgagaaatgcaccttctgctaccagcgccttgcccgtgaggaggtgccggcatgcatggagttgtgcccggctcgcgcccgtcacttcggtgacttcgacgatccggattcggaggtgtcgaagcttgtcaaagagcgctcctacgagcagctgctggccagcgaaggcacgaagccatccgtgtactacctcgtgtaaggggattgatcatgtctgagaacgtatcggcggagaagtccgccaaggtttccgctgccggattcggcggcaaaggggttgctgtcgccatcgtggtggcggccattctcaccgtcggcggtttggctttgtgggcatttcagctgaccagcggcatggtgaacaccaacatgcgcaatctggactcgtgggggctttacatcacgatgttcatgttcctcgtcggtctgtccgccggcggccttatcgtctcgagcgctccgcgcgtgttcggcatggagggtttcggcggcgtgtcgaagatcgccgtgtggacctccatctgctgcacggtgctggcgatcggcttcgtcgtgatcgacctcggccagccgctgcgcctttgggagctgttcgtgtactccaatctcggctcgcctttgatgtgggacatcatcgtgctgggcacgtacctgatcctgtccgtcgtgtatttgtgggctatgctgcgcttcgagggcggcaagggctctgccgctgctttgcgcgtggtgtccgccatcgctctggtgtgcgccgtgctcgttcactcggtcaccgcttggatcttcggtttgcagcagggtcgcgagatgtggcataccgcgcttctgggcccctggttcgtgtcgtcggctctggtgtgcggcgtggcgctcgtgctcgtcgtggtcatcgcgctgcgcaaggctggttacctggagcttgcgcaggagcatgtcgtcaagatgcttaagctcctcggggtgttcgtgatggtggatttgtacttcttcggttgcgacttgctgaccgagggcttcccggccggatcgggggcggaggtcgtcgccatgctgaccacgggtccgctcgctcctttcttctggatcgaagtcgtagggtgcgccgtcactgcggtcatcgccttcgtgccgaagctgcgcacgaacccgcttatcgtgattgcggcggtgctggccatcgtgggcatcttctgcaagcgcgtgcagctgctggtgggcggtttccagatcccgaacctcgatatgcccgccgtcgtgtccggtccggctcttacggatgcgggtgcggctctgcagagcgcaggcggatcgatggtgtactttccgtcgatgctcgaattcggcgtcgtgctgggcgttttcgggctgggcgcgctcatgctgctgctgggcctcaagtttctcccgttgaagccgaccgagcgttcgcactagatacgatccgtttttcggcggggcgcccgaaccatcgggcgccccgccgtgcgacatggaggggtggcgaacgagatgctgaggaaagcgatcatcaccttggcgacgttctttttcgcgggggtcgtcgtgttcggggctgttgcggctgcgagtccggcggtggggcttccccggcctatcgagccccactcgccttgcccggtcgtcgggtgcgcgtcggggtcgtgccatggtttcggcgatgtgcccgagccggatggcgtgcacgagatggcctgtcccgaggcgggctgcgccagcgtcgagtgccatgcgtgggacacgctggcgacgcgctatcaccgcgcgtccgatgccagcttgaacctctggatcttggcgccggtcgcactcgtcgggctgcttgttctgatcgtgcgaaagctttaagaggggaagtgacctggtgaagcggatgctcgttgttgatttctcggcgtttctggcttatgcgcttgcagcgcttccctcgttgacgggcgtgcctgcgcacgaatggtttggtttggccttgctggcgcccgttttcgtccattgcgcgcagcatgtcgatcgggtcgcgcgcgcccttccgcgatgcgcccgcggggcgcgtctgcggagctgcgggcgtttggcgctcgatgccgcgttgctcgtggcgctctcgaccgtcttcgtgtcgggattgggcatgtcgggcgcggtgctgcaggcgttcggcctgtatgccgaggggtattatacgtggtcgcctctgcatgccgcggcggcgaaggcgctgttcgcgcttcttctcgtgcatatggccgtgcatgcgggttcgctgtacaatctgctgaaacggcgcggcgttgcaaaggccgccgcgcatgacgacggaggtttcgacgatgagcgccgatctgtttgaggcgaggcccacgctgcgcgcgtggcttgacgaatatgccgccatcgaagccgattatcttgctcggcttgtcgattggggcatccgcatcgcgccgcgcgatgcggatgcggatgcggcccgcgcggcgaaggatcggctgcgggagaagggcgcgcagttccgcaacggcgatgcaggcgtcgtctgcggcaacctgtcgtcggcgtgcgtggcctgcacgggaggacgggggagcaagacgttcttcctgtcgctcgcatgcaatcgatcttgttatttctgcttcaacgccaaccaggccgactatgccgatcgtctgcgcgtgaacgatgcgtggcgcgacgaggtcgatgcgttcgccgatgcgtgcggcggcgaggtcacccatgtggggctgacggggggcgagcctttgcttcatgccgacgagtccgtgatgttctgcgcttacgttcgccagcgctttccgcgtgcccatatcaggttgtacaccgccggcgatttccttgacgaaccgctgctcgattgcttgcgcgacgccgggctcgacgagctgcgcatgagcatcaagctggacgttttcgacgtcgatcgcgccgatgagatcatcgatgatgccgtcgacgtgcttgcccgtgcgaagcgcttcatcccgcaggtgatggtggagatgcccgtgataccgggcacgggcgaggcgatgcgtcgtctgctggatcgtcttgatcaagtcggcgcgttcggcatcaaccttcttgagttctgctaccccatgggagcttgggacgagttcgagcgccgcggcttttcggtgaagaacccgccgtttcccgtgctgtacgactacggctacgcaggcggtctgccgctggcgggcagcgagctcctgtgcttggagttgttggagtacgcgctcgacgaggggttgtcccttggcgtgcattactgctcgcccgagaacaagcaccgcgatcagatttgcgttcaaaacggcgcttgctccgtcgatgcgggagtgtacgagcgcgatccgcacgatttcttcctgaaaacggtgaaagtgttcgacggcgacgtctccttggcgcggcacgcgctggaggcgtgcggcgtcggcgcgttctcgcttgaggacgaaggccttagcctggctttccatccgcgtcacatccctatcgtgcaagcgctgcccgtcgtattgtgtcgatcgatcaacgtgctggaagaaaccgcggatggcttcatcgtccgcgagctgaaactggaacctgtgaaaggcgaatgacgatgactgttgaagagctctggcaagcccgcgccgccgcctgggagctcgcggcgctgagcctgcgctacccgggcgcggagctggccggagccgcggcgggcggcgagtgggacgaggcggcgcgggagatcctggccgcgctgggcctgcccgcggaggtccccgcggcggcgggcgatcccgcaggccctcccgccgcccgcgcggccggcgccgaggccgccgcgggcgccgacgcgctcctgcgcgccctgcgacccgaggccacgcgcctgttcgtcggcgcgcccgagcccgcctgctcgccctacgagggcgtgtgggccgcggaggccgacggggtgcagccgcttctgttcgtgaacccccgctccatggaggtcgagcgcttcatgcgctcctgcggcctcggccgccccgagggcaccaacgagcccctcgaccacgtcgcgaccgagtgcgagctcctggagcgcctggccctgcgcgcggccggagccccggcttccgagggcgccccggacggcgccggcctccccggagggagcccggccgccgcctacgagaccttcctctccggacacgcccaagcctggatgccagccttcgccgagcgcctggccgccgaggcgcgccatcccttctaccgcgcggcggcggcctacctgggggcgctgctggccgactggccgtcggaagcgtaagcgcgcgccatggcttcggcgtgcttgaacagccaggcgcggacgtcgggcggctcgagcacttccagcagagggccgaacgacagcagatagtagcgcgtgcgttcggtgatgtcgcaggtaagggtcacgagccagctgccgtcggcctcgcgcacgatcgtctcgggcgcgaactcctcgcggacgcgcgactcggcctgcgcggcgaagcgcatcaccagcacgtcgtcgcctttcatgtgcccgccttcatcaagtgcaggcagctcgcgcgcttcgaacgtttccggcagcacatccaacgtttcccagtcgatgcggaacagcttgaacatgcgccatgcatcccgctcgcggcaccatgcgcgcaggtaccacgacgattccttgaacataagctgggcgggttccacggtgcgctcggtgcggttgccctcggcgtcgaagtaggcgaacgacagcgggtgccgcccgatggcggcgtcgcggatggtgtcgaacgcggcgcggtagttcggcggcgcgccccagaacgagaaatccatgtccagccagttcacgttctcgcgctggaataggcggccgaggcgcacggccgtctcgtcgctcgcatcgtcgctggccccggtgcggttgagcgcggagagcgcggccatgatgtcgtcctgctctcgctcgctcagcaccgagcggtccagcacgtagccgtccatgaggtgcacgccgccgcctttgccgcgcgtcatgtacaccggcacgcccgcggccgacagcgcgtcgatgtcgcggcgcacggtgcgctcggacacctccagcttgcgcgccagctcgcccgtggtggcggtgccgcgatccatcagcaggtagacgatttcgaacagacgttgaggctgcatggcttcgtccttatgcgcagtcggtcgggacgttggcttccagcgcggcgttcgcttcgtcaagcacctgctgcacgaagtcggggcgcgtgcgagccagttcgctgaaaggaacgggatccgccgggtcgtcgtcgaagggggcgagctctttcacgtaccaggtcacgtcgtgccacgaacccgccttccagccggcgtgcgattgcacccagcaacgctggaacccgcagccggcgtgcagacgctcgcttgcctcgttcggcacggttaccaggccgtatgcgcttttcacaccctgcgcgcgcagcagtttcagcagcgcgtcgtacagcgtgcgcccccggccgcccccggtcgcgccttgttcgaggtacaccgagagctccgcattccaccgataggccgcccggctggcttgggcgtgtgcgtacgcgaacccgacgacgcgcccgtcctgctcgaggacgaggcacggataggcggccatcgcgtcggccatgcgcgcggcgaattcggcgcgcgagggcgcgacggtgtcgaaggtgacaggcgtctcgacgtacggcgcgtacaccgcgcgcatggcttccgcgtcgccgcgcgccgcgatccgtacgttcgcgctggtcgcacaaggggagaagtccatcggttcgatcctttcgtgccggaagggaaggcggtgcgcacggtctgggcagaaccgcgtccccatactaccacgagcatgcaaccggcgtccgcgccctcgtttggcgcgttcgaggcttccgatcgaacctgcgtcgagcgtgcttcggagaaggatggctgcgccctgttcgcctgttggccccgctggcacgatttcgctcatctatatgctgcaaaatcgaggttttggcacgctgggcgctctccatcgaaaaaggttcggacaaaaccccagatcacgtttttctcgcggtgacgaaaccatcgttgcaagggggggtcgactgccaaaaactcgattttgcagcatagaggtttcatccgtgctgtcgaacggccatgattgggttcccggtggatctccttgctacccctctttcgcgaaatgcaatatatatttgacattatgttagatagatcgtatagttatggaaaagaacgagtggattcgcgaaagggaaacgatcaggatgagcgctgtatcgtgggcggcttccggcggcatcggacgtagggccggcgttgcgccggtcgcgggcgcgtcgtcgaccgcccccgccgaaacggggaagaacctgcgcatgaaggccgcccgcgtggccgccgatctgtctcaggccgacctggccgcggcggttggtgccacccgccagaccatcggcctcatcgaagccggcggctacaatcccacgctcaaactgtgcatcgccatctgtaaaacgctgggatgcaccctcgacgaccttttttgggaagaagggagtgcgacatgaagatcattgagcgatggagggagcaccgcgggtcggtcgacgagcgcgtagaggcggaaagcaaccgcgtgtacaagctcggcttcgtcatgctctcgttcggcgtgctcgtgtatttgtactacgattggtcgctcaaacaggcgatgtgcatgcgcgacgtgctggcgaacggcgcggggcgtatggaattcacgtcggcggacttgttcctgtacggatggttcgcgctgacgatgatcgtcggcatggtgcttctcgttcgcaaggggttcggggacgacaaccggttcgccgaagccgagcagttccccatcggctactatgcgatcgcttcgatcgccttcgccgtcgccgtggacgtgttgacgacgggtctgcgcgtgttggcggaatttcaagtgctgggcgcgggggagatcatgtggccagcagtggcgttcggcagcgtgttcgcgctcgtggcggggataccgcttttcctgctcgggttttgggttgctttcaaatccgcgcaaagccgccgcaggcagcttgacatgcgcttgggcgaatagctctttcgtgcgcctcttccgactagcacgaccccgtggcgctcctatgttgtttggccgttgcgtacttgtatactcctgttcgttagggaatactgcacagacggaacgacccggaagcgcgaagcggcgaggcgaaatcgtcggaaaggctgttgtggcaaggattctcaaaacgatcaagcatcggttgaagcatcggccggccctcgtggcgggcgtgatcgtgggtgccgtggcggtgttggccatcggcgcgtgcgcgatggctgcgagcgccgtgcgacccgaggatcccgtcgccgtggccgacgaggtggttgccgcgctccccgaagcgactgcgcagacgggacaggctgcggcctcgcaagcgcaatccggggatgtcgtcgacccgcgcgccgtcgccgaagatgcgcgcacagcgctcgacgccgcatcgggcaccgaagacgtgaacctgttcaattcggtgaccggcatcgcgcgcaccctgtcctccgacgagatctccgatgtggaaggcgccatcgcggcataccacgatgcgggttacgaggtgggctttgtcatgtacgacctgaccacgcacgagggtgtggggtacaacgccgatcaatggttcttctctgccagcacggtcaaggcaccgttcgtggctttcgcgtcgcaggatatggtggacggcggccgagcctctcttgatgaagaggtggtcgaagacgtcatcctcgacggtaccggaatcatgtcgtcggacgatatagatcgctacgacctgcaaaccgtcatggccaacaccatcgtgcattccgacaacaccggttacgggctgttgcgcgaacgcttcgatcagaacgatttccaggcttggtgcgctgcggccgacgtggacgccgccgcttggcagggcgaatggtatccctattacacgccgcgcgacttggcgaagatgtggctgaacgtcggcgcatacgtggccgagggccagggcaacgcgccgtggctcgccgacgtgctgcagcagactgaactgtcgtttctgcgcacggcactgggcgagggccgtcgtgttttgtcgaagcccggctacgagatcgatacgccctggtacgacatgggcgcgctcaacgatgctggcctcgtggtcaccgatactgatgtttacgtaatcgccatcatgtctgatgctgattacgatgacgaatacttcaccgacaacgagcacctgatcgtcgatcttgcgtccgcgttgggggcggcgcacgatcgcctgctgttcgaaggaggcgtagcatgagatccgcacgctggagcgtaccgaacgcgatgctcgcgggagttctggcgcttgctctgtgttcgggcggaaccgttttcggcggcggggtcttctcgcgcgcctgggcagacgaagcggaagaggcgcagagggccgtcgacgatgcgcaggccacgctcgacgacgccgaggcgcatatggaaagcatcgcgggcgactacgacgccctcaagcaggacgtcgaggagctgcaagcgcgcgtcgacgagatatcggcccaggccatggatgcccagcaggcggtcatcgaaggccgcgcggctctcggcaagacggcggtgcacgagtacctcaacgggggagcgtcgcagtcgctcgtgaccatggtgctggaggcgcgaagcttcagcgaccttatacgcaatctcacctatctcgattcgatcatgcagttccacgccgacgaggtggaggcacaaaaagagcgctcggcgaagtacgagaagctcatcgacgacctgaacttccagaaagacgagcaggagaagaagctcgaagagctggaagcgaagcgcgcggaagccgaaaccgtgctgtcccaggcgagctccaagctgtcgaacgcccaaagcgaccaggccgcgcgtttggaagcgctcaggcagaaggccgaggagctggcggctgccgatggcgccaccgggccggtcatcgacgagaatgcggataccatcggccgcgaggacgtggtcgattccaacaccccggtccagccgaaccccgatccgaaccctccggcgccggctcccgagccctcgcccgatcccgatccggcgccaagtcccgctcctgatcccggcatcagctggtcgaccggcatcgcgtccgcgtacggcggttccaccgatccgtacacgccgaaccccggcaccacggcgaacgggtcggtgtgcgacgacaactccatgggcgtggccatcccgatgtcatggccgaacttccgctcgtatttcggccgcaccgtcgagatctcctacaacgggcaaaccgtgctggccaccgtaaacgattgcggtggcatgggcgggggcagccgatctctcgacctgcagcccggcgtatggaaggccttcggcttctcgtcgtgcctcgactggggtctgcgcacggtcaactaccgcttcctgtagaacgccgcgacgcgtccttgtgaaatttcccgcacggcgtgcgctcatgtgctaaactgcatcgttacatgcgatgacgaagacagcgccgcgcaacgcggctgccggcagagacgggtgccaccggctgaaagctcccgggcagcaagcgcgacgattcccttccgagcagcgcgtttgaacgcggacgcagaggcgcgaccctggtcgccgccccgcgagacgctaagtaggatgcgccgggagctcccgtcacagagcgaacgagcgggcggcgcgcgcaggcgcggccgtcaaccgaggtggtaccgcgagagccttctctcgtccttggactttgggcgcatgccctcaggagcaaggacgagagaaggctctttttcatatgcgccgccgggcgggcggcgcggggcgagagacggaaagggacggcagaatggcaatcgtggaggaactggaggcgctgcgcgagcagaccatcgcgcagatcgcgcaggcggccgacaccgcggcgctcgagcaggtgcgcatcggcgtgctgggcaaggcgggcacgctgaccgggtacctgcgccagatggggcagatcgcgaaggaggagcgcgccgccgtgggcaagacggcgaacgaggtgcgcgccgccgtcgaaggcgcgctggccgcgcgcaaggaggagctggccgcatccgagctggccgccgccatcgacgcggccgccgtggacgtgacgctgccgggtcgctcgcagcaggtgggcacgcgccacctcatcaaccgcatcaccgacgagatttccgagatcttcctcggcctgggctacacggtggccacgggccccgaggtggagaccgactactacaacttcgaggcgttgaacgccccggccgaccaccccagccgcagcctggccgacacgttctatgtgcgcgacctttccggcgcgcaggcggccgtgcgcggcgagtccgacgtgctgctgcgcacccagacctccggcgtgcaggtgcacgcgatggaggacaacgagctgcccatctacgtgatcgcgcccggcaaggtgtaccgccgcgacgtggccgacccgtcccacctgccccagttcacgcagatcgagggcctcgtggtggacgagggcatcacgttcggcgacctcaagggcacgctcgactacctgtgcaagcagatgttcggcgaagagcgcaagacgcggttccgcgcccactacttcccgttcacggagccgtcggccgaggtggacgtgagctgcggcatctgccacggcgagggctgccgcttctgcaagggcaccggctggctggagatcctcggctgcggcatggtggacccgaacgtgctttccatgtcgggcatcgatccggagaagtattccggcttcgcgttcggcatgggggtggagcgcatcgcctgcctgaagtacaacgtgcccgacctgcgcatgctggtcgaaggcgacatgcgcttcttgcggcagttctagggtttctggcgggacgcttggcgaggcccagtcgctcagacagtcctcgctgcgctgcgaaactcgcttggtggacctcgccaagcgtcccttcgcactgttgacgttgttgcgctgcgtctgctggctagctcggatccgagttgcggtattcagtcagacgggggcttggtggaaagaggaagagctgatgaaggtttctttgaaatggttgtctgagtatgtggacgtgccttcggacgtgaaggcgttctgcgaccggcttgatttgacgggcacgggcgtggaggcggtcgagaagacgggcgacgcgttcgacggcgtggtcgtgggctacgtggagacgtgcgagcagcatcccgacagcgaccacatgcacgtggtcaccgtggacgtgggcgcgggcgagccggtgcagatcgtgtgcggcgcgccgaacatcgcgcaggggatcaaggtgccggtggccaccatcggcgcggtgctgcccggcgacttcaagatcaagaagtccaagctgcgcggcatcactagctgcggcatgtgctgctcgcagcgcgagctgggtatgggcagcaaccacgagggcatctggatcctgcccgaggacgcgccggtgggcatgcccatcgccgactacctcaagctgtccgacacggtgctcgacctcgaggtcacgccgaaccgccccgactgcctcagcatggcgggcatggcgcgcgaggtgggcgcgatgtaccgcaccgacgtgaagcgcccgcagatcgacctcgtggaggacgccgacgcgacccctgcgtccgaccaggtgagcgtggaaatcgccgacgcgtcccgctgctgccgctacacggcgcgcgtcatcaagggcgtgcaggtgggcccgagccccgactggctggccgagcgcgtggccgccgcgggcgcccgctccatcaacaacatcgtggacgtgacgaactacatcctgttcctgctgggccagccgctgcacgcgttcgacttcgacaagctggcaggcgcggacggcaaggcgcacatcgtggtgcgcccggcggccgagggcgagcggttcaccacgctcgacggcgaagaccgccagctcgtgcccgacatgaccgtcatcgccacgcccgagcgcgccgtggcgttggccggcgtcatgggcggcctcgagaccgaggtcaccgaggctaccaccacggtgctgctggaggccgccgcgttcgatcgcgcgcacaccagccgcacgagccgcaacctgggcctgatcagcgagtcgtccatgcgctacgagcgcggggtggacgacaacccggtggccctcaacgccgacatggccgccgcgctcatcgccgaggtgtcgggcggctcggtgtgccccggcatggtggacgtgtggctggagaagaccgatcctatcgacctggagttccgcgtgccgcgcttctgcgcgatgatgggcgccgagatcccgcgcgaggaggtcgtcgacatcctcagccgcctgggttgcgaggtgtccgatgccgacgacgccgacgtgctgtccgtgacggcaccgacgttccgcccggacctggagcgcgagatcgacctgtacgaggaagtggtgcgcctctggggcatggaccgcatcccggccacgctgccgggcggccgcggccgttacggcacgcgctcgcagctggagcacgtgtccgacatcatccatcgcaccatgtgtgcgagcggcctcaacgagacgatgacctactcgttcgccgagccgggcgacctcgaccgcctgcgcatgagccacgaggggctggggcgtccggtggagctcatcaacccgctgaacgccgaccagtccgtcatgcgccagagcatcgttcccggcctcatgcgcagcgtcgcctacaaccagagccgcggcgtgaagaacgtgcagctttacgagatgggcgccgtgttcttcgcgcacgagggcaagagccagccgaaggagcgccgccgtctggccggcgtcatggcgggcgccatgggcgatgccggttggaacagcgctccggccgcgttcgacttcttcgacggcaagggcgcgattgagaacctcgcgcgcgagctggcgctgccgaagctgcgcttcaaggcgctctcggccgacgaggccccgcatttgcagccgggccgcgcggccgcggtgctgtcgggcggcaccgagctgggctgggtgggcgagctgcacccgctggccgtggacgccttcgacgcgacggcgcccgtcgtggcgttcgagcttgacgtggacgctctcgcgaagtcggcgcgccccgcacgcgactacgtggacgtgcccacgttcccggccgtgtccatggacgtggcgttcgtcgtggacgagggcgtcacccacgagcgcctcgtgcagtgcatgacctcggcgggcggcaagctcttggaggacgtgcgcctgttcgacgtgtaccgcgacgaggcgcgcgtgggcgcgggcaagaagtccatggcctacgcgctcacgtaccgcgccgccgaccgcacgctcaccagcgaggaggtcgacaaggctcacgagcgcctggtcaagaaggtgtccagcgccaccggcgccgaagtccgcgggtaggtccgccctccaggcgcggctggcgctcgggttgccatcccgagcgcaggctcgcccgtgctgtccctgcgtcccgtccagcaacgacggggacgcagggggccggcgggtggtcggcatgtcgatggcggtggtatactaatgccatgaaagtgctcgaccaacataccatcgcttcggctgtgcgctctattgctcctggttacggagttgtgaaagcgtacctgttcggttcgcacgcgcgcggcgatgcggatgcggcatctgatgtggatctgtgcattgagcctgacgacgggttcacgctcttttcccttggaggcttcggcagccatcttgaagaggcgttgggggtgccggtcgacgtggtgtgcggggacgattcgttttacccgcgtgcgcgcgagcgctacgagcgagacagaaagctcatctatgagaaatcctgaagcgatcgaatgcatcgaactgatggtgccgctttgcgatatcgtatccgaccgaatcgcgcgctactcgatgtccagagaaagcgtgtgcctgaacgacgaccatctcgatcttttgctgatgccgatatttcagatcggggaactgatcggcggaggcggatacctcgatgctttgcaggaactctatccttcggatatgtgggttcaggcatatggcatgcgcaatcgaatcgcccatggttatgcaaaattgaagcctgcgattgtttgggaaacagctataacaagcattcccgccctgcgggaattgtgcctgcggttgctcgaagactagcgcggtatctgccttacatccccatgattgcaagcgcttcgatcagggttcgtgcgtttcaggctcgacggggagatcgctcccgctgcatccggaaaacgatgctataccgagcgcgaacgcgaaggcgaggctagtcgtcagaagggacgttcggttggattggcgcatgggggcgtcctttcctcgtcggttccgtttccccagtatagcgcaatcccgttaccggttcgtcaacggacgcacacctgcgtgcggcgccgccgtacgacaattatgcggacggcgaaaggggcggcatggcgaaatcggtgggcacgcaggatagggagttgcgcaagcggcgcatggctgtggcggcggcgctgcttgcgttcgccggcatcgtcggggtgttggcgctgctgttcggccgcgacgcgctggctttcctgaccgacggacatcgcgtgcagcagcaggtggagcgcttggggccgcttgcgcccgtggtgttcggcctgctggtcgttctgcaagaggtgacggtgatcgttcccagcgagccgctggagcttgccgcgggctacgcgttcgggttctgggagggcgcgttcgtgtaccttgccgccagcgtggtcggttgcttcgctatcatcgcggtagtgcgcttcggcggcgatcgcgtgctcgagctcgtcctcacgagaaagggtcgcgagtggctggcccgcttgcgcggggcgcagaggttcgacttcgctattctcgcggcgttcttcatccccggcctgccgaaggatctcatggcctacctcgccgcgttcgccggcatgcatcccgtgcatcttgcagtcgtcaccacggccggtcggttgccgtcggtgctggccatcacgctgggatcgtcgttcgccgccgcaggcgattggcgggcgaccgccatcgtgttcagcgtcaccgccgcggccgtggtgatcggcgcgctcgcataccatcgcttcaagcgccagcgcgacgggggtgcgggaggagcggcgaagtaggcggacgatgcgcttagcggggcggtgcgacggtcttcagaatctagagaaaactccccattttgtccataggtgttttggtcataattacgaatgtcctccaggggtatggcgcgggatttgctggcgaacggagcgggcgggacgggcagagtgggatgcgatctcccgatcttccttctctttccgatgttcgcgatgtctaacaagcggtacaatagccggcaaaacgaaaggatacgcgtatgtacgacggacgaaccaacccgggccgcaacgacgaatgctggtgcggcagcggcaagaagtacaagaagtgccacctcgctttcgacgagcgcctgcagagcatgtacgagcagggcttcgaactgcccgaccgcgcctcgctgaaaagcgctgccgacatagagggcatcaagcgcagcgcgaccatcaacatcggggtgctggactacgtggccgagcgcatcggaccgggcacgaccaccgaggaggtggaccgctgggtgcacgactacacggtggagcacggcggcatcccggccgacttgaactacgagggctacccgaaaagcgtgtgcacctccatcaacgacgtggtgtgccacggcatcccgtccgaggacgacgtgctgcgcgaaggcgacatcgtgaacgtggactgctccaccatcctcgacggctactactcggactcgtcgcgcatgttccgcatcggcgaggtgtcgcccgagcgagcgcgcctcgtggacgagacgaagaaggccatggaagcgggccttgccgccatcgagccgtgggggctgctcggcgacgtgggcgcggcggtgaacgcgtacgcgaaggcgcagggcttctcggtggtgcgcgagttcggcggccacggcatcgggttcgacttccacgaggacccgttcgtcagccacgtgtcggaaccggggacgggcatggtgctggtgccggggctcgtgttcaccatcgagcccatggtgaacgccggcgaggcgcccatcgacatgagcgacccgaacggctggaccgtgcgcactgccgacggcagcgacaccgctcagtgggaagtgcaggtcgccatcacggaagacggccacgagctgctttcctggtagaggacaacagctcggttgtcgttcctcgaggcgcatgcaacgtttcgttcaggtaaaaagacttgtgttttttgaaggcgcccgggacaccatggtatactaactgctgtaaaaggaccaccggatctaggtgttcgcactagtggtgaaggtggcttcggggaaagcgtcccgacactcgatctaggtgttcgcactagtggtgacggtgtccggggcgcttccgtgtttaaggaaatcgtaaatcctgatcagcctctttatttccggacaatcgttgaaaatgcgagggttgttccctatgtccgtcttgagcagcgtctccaagctgtcgatatcgtattcttcgatttcgagaaagcagagctttctgtagaggctgtcggggttataggcaagaaagtgtgtccagagcctaatcgtaatccatgcgataagggccgcttgcatgcaggtcattccattgcacagcagtgccccagcgccccaccgcttcatctttttcgctagcttcggcagctgctcgataaaactcagcaatcaggacgtccgtcggcatttccttcaggatctctttcgggcttgcacgggcttcaaggtccatatagcaccaccagaacgccgccttgacgcgcctcgtcagcctcaatccccgatgctctcgcagcatgtggcggatctgggcgttcacgccgccttcgatcctgttcgtagtcgccggaacaggtcctccctcgagcaggccttcgtcgagataggtgaatagggtaccggccctacaaagcttcagaagcccgccgcgcgcagtgcgcagcctctcgtgcttgtagcggatccgcccgtcaaccacctctttttcctttaggaatccttcccatgccgtgcaccaattagagaagcccgcaagccactccgcagcttcgttgaggctacctatgcgcatgagcttcttggcgatgccatagagctcaacgcccgcctggagccgcggcctggtcgtggtctggcgcttcacctgacagaacgcatggaagacgcagcgctgcacgcgtgtgttcggccacacggcgcgtctcgccttctcgaacccctttccgccatcggtaatcacgacgtcgggaggggctatgcgcgccatgagcgccgcccacgcctgcgcgttctcgcttctcgctagatgccagccgatcacgtgcttctcggtgcaggcgatcataatcacgacgtcgcgccccagccaaaggccatccacctccaccacgtggtggacctcgtcacagacaggagccacgggccacaggtcccagaacttattcgtgagatgccggaaggtgcgtccgggcatgccgaactcgccttgggtctttttcgagagcagccacctcaggaacagctctagcagtttaggctcgttgtcgtaacgttgcgtggtggatgcgccgcatgccttgcagcgccaacgagtcgcccccgacgaggtcttcccgttgcgtttcgtgtcgcccccgcacgcagggcacagtatcttcttcatcccgtgattgaaccacggaatttaagagggcggtttacggcctctgacctgcggtgtcaagtcgaaagcggacacacattcttgccaggcacttaaacctgcctccgaaatttaaacgatggtttatcgagggtttgacctgcccttacacccctaaaacggacacactttcttgcctataacccggctgtcgggcttgttctcgcttgtgcgttccatttcgattatcgcactgactgtttttacatcgagttgtttacggaagcttttcttttggctgcgataggcactgtttaaatacgaatcgatggcggtatggtttttcgcgaattcggaaactttgtcgtaaagctccccttcgtacacctccaagtatttgaaaattggcaaaccaccggtattgtgcttgagcaaatcgggcagatattgctcgaccaccagcctcggattgaggttcatattgtcgaacacggcatccagatagatgtcgttagccttgacggggctccctttggatgtggtatccgctccgattccgatgattatcttggcatcttcgggcaaagatgagattccgtcgaagcctcgagtggttacggtgccatgtgttgacagatccatttgaaatatcttctttttcagcgtcctcataagcctaggcggataaagcgtttccgatttcgcgattgcttggtaaataggggtgaaatcgtcggaagtgatcgttgtcatttcgatggaagcttcggatccgaacgattgacgggtatatgtgataccgacgtcgctgccgtgctgcacgaaaatcattcggtcgcgcagtttgccaagcccttcaggcccaaggcattcggcgagtgattctaggatgttgagaatgtttttgtcgttcatggagtagcccatgaacacaatggggtattcgacgaaaacagtaagaattttggcgaccaggtaggcttttctcgtgttgaacgaatcgtagtccgatgaggtgatgacgatgctgtcgggattgtcaaccgacccgtggattttgtatatctcccccacttcgtatatatctgagaggagcagctcgctttggcctgcgtaggttttgaagccggggaacaatccttcgatgaagcggtcgtagttggtggtgatcactcctgagatcttattcgatgctgcacgaaggacagagagttcttcgtgcaaaagagtcggttcgtatgtgtcgagatagcgggcgatgaaaagcttgaaagcggaagtcccggccttcagctggtcgaaatgctcattcctgaacccttcgaacgatggatcggcgagagcagtgcgattgaagtctttctccatcagtgtagcgattgccgggtatcgttcaaatttccctgtgccggacacctcgttgtcgtatctctcgagtgcgaatggattgtcggatattctcgcgcatatccctcgtaagagggattcccaattggggagctctgcatacctcataggaatgcctgagcctacgaacagaaaggggtggcgaccggttttgcgtaggcgagaccccagcttcactctaatctcgtcatacttggtctgttcttccataaggccccttcctctgctgagctttagcttatggtatcacgaaggctttgatataggcgcgaccatcgaagccgttcgcaggagagccggggagggggtcggctctcccgcgtgacctgctacttctcggccaccatgcggccgatgacgtatccttcggtgtagcagcggcccagcgacaggccgaacacggtcagcgggtagtcgatgccgccgtagaagtggcccgaacagttgccgatggcgtacaggttctcgatgacctcgccttcgggcgtgaggcactcgtgcttcgcattcacgtccacgcccgagcagatggcgctcatgcgcacgtggcgatggatgccgtagaagggcggggtgtccacgggaaccaggtagttcgccggcttgccgaagtccttgtccttgccggctgccgccaactcgttgtagcgcttcacgctggcgacgaacgcggccttatcggcgatttccagcttgtcggccagctcctcaagcgtgtcggccttgaacgtgttgatctgcccctcgaacacgccctcgcgctccacgtcctcctcgggcatgtacactttcaggccctcgggatccaccagcttgccgggccactcggccgccgcttccatgtagttgctgtcgaacacctggcagtagtgccccgaatcctccttcgagcgcaggtagcagttcagaagcgacatctccacggtctcgttcacgaagcgcgttccgtccatcttcacggccaggaacggcatgtcgcacatggaggccgggcccgcgtcgaagtcgtgcagcatcttcgtgtgcgccaggtcctcgatcttgccgcctgcccacaccaccatcttgtggccgtcgccggtcttgttcgtctgcttgggctcgaagttcgtcatgtcgggctggtagtaatgcagcatctcctcgtcgttctggtagtcgccgcacgccacgatcacgcccttcgaggcgttgaactgcacatgtccgtccttgcccttcgcgatgacgccggtcactttgccgccgtcgcccgtgaccagctgctcggcgggggtggagtagaagatctcgacgccttccttctcggccgtggcggccagcgcgcgcatgccgtcgccggtgttgtagggcttggggccgaagaacgaggtgacgaaattgatgtcgtaccccttcttgttgatgaggggcatatgctgttgattgccctggtcgatcacctgtgcgccgccttcgagcgatttctcgatgacccacttcacagcctcgccggagttctgcgcccacagctctaccagttcgcgattcggacggtgctggctgtcggcgatcagctgcgatacgaggttggcgatgtcggccgggttgctggtggccaggtcgatgccgctgcccgagttgccctgcgcgatggcctgcgattccttctgaagcagcgccaccttcgcgcccgcctcgaaggccgacagcgcggccggcacgcccgatgcgccggcgccgatgaccaccacgtcgtagtcctttgtctccttgacatcggtgatggcctcgggcgcggtcaggaagctgggcatgccggtgcgcaggtgcccggcagccgtggtggtctcgtcggtcgtgcttgtcgtgctggccgagcctgcggagcccgtcccttgcggcgcgcatgacgccagtgccccggcgcccacgacgcccgctgctgcgatgcctccaaatttgaacagatcgcgcctgctgattccattgttatgctcgtgcatgatgccctcctagcgtgtcgatccttcgcgttcgcccagttttttcgggcgaatccctcgagatgcaccatagccccgcggcgcgcgcctgtcgttcgtccacgtgccgggaaacggggattattttcatcatccttgcctatcatcccatcgttgagcaggcagtatgagggatcgaggctctggtcgaggtgcggagctccctgggcatagggcgatagtttcgctagaatggtgaaccatcgaaacactggggagggggtgccgacgagggcagcgcgtcggttcgatgctatggaaaacggcgaaacgaagggatccggggagttcgatcgaccccgagagagcgcggagcttcgcttcgcggacgacgaagcggtcggcgtgcgggaggccgacgcgcccgcgtgtgaggacggcaccgttgcgggcgcacgggcgccgggcccgctgctgccgtggctgccgtccatcccgctgttcttcctcgggctgggcgtgtaccgtgcgtggatcgagatcgtgttcgtgggctcgttcgtccggttccccgcggcctccgtcgcgggccacgatgcgttcgacctcgtgatgatagccacgatgtttctgtgcgccgcccttgccaagcgtatcggcccgctgttcggaaagcgctcgttgtacgccgtgtccggcgttgcgcttacggtgtccacgctgtgcatgttcgcgtccatttggataccgaggtcagcggatgctcttgccgtgccggcggtgctgctgggcgggtttggcattgcgctcgtcattctgctgtggtcggaactgtacggctgtctcaatccgtttcgcgtcgcgctgtactattcggcgtccatgatcgtggcggcgctcctcatttatttgtgcaggggtttgctgttaccgtggctcggcgccgtcgtgctcgtgctgcccgtcgtgtcgcttgccgcctgcgcggcggggttccgctcgttgccctccggcgagcttccgcgcgccaagccgtcgaagttctcgttcccttggaagatcgtgttgctcatggccatctacgcgttcgcgtacgggctgaaggaatcgtcgatgtaccagtcgacgctcggcccgcattcggcgttcggcacgctggcggtggccgctatcgtgttcgtcggcgtcatagcgcgcggcggcaagttcgacttcggcgtgatctaccgcatcgcgctgccgctcatggtggcggctttcctcatcttgccgaacgtgggcgtcctggggcaggccgcgtccgatttctgcacgagtgcgtcctacaccgcgttctccatcctcatcatgctcatcatggcgaacctgtgctatcgctacgggatgtcggccgtgtggctgttcggcatcgagcgcggcgtgcgtgcgttgtttaccctgttcggacgccagaccgagcagctgttgggcgcgccgtcgttcggactggccggatcggatgccgtcgtcagcgggctcgtggtcatcctcgtggtggcagccacgatgatcctcttctcggaaaaggagctgtccagccgctggggcgtgtcgtttctgggcgaggatggcgcggcgggcgaccgggccatcgtcaagaagcaagagctggcgaaccgatgccaggagctggcgcgttcgtacggcctgtcgccgcgcgaggaagaggtgctgctgttgctggcgcagcgcaagaccgtgggatccatcgagcgcgagctgttcattgcgaacggcacggccaaaacgcacatccgccatatctaccgcaagctcgacatccattcgcgcgacgagctgtccgatctgctgggattattcgaataatttaacaaacaaatgttcgtatcatatgctatactgttctcgaacgaaagaaccagtgcaagcgctgaacccgacgcctcccgaaggacgggcagcccatagatgaccgcggtgttccacgcgatccgtaccacgcttgcaggatcgagcatcctcccacgccctggaacacggtaaacgaggtgtcgtactatgcctgcattcggaaatcaaatgtcgtgctcctaccctgaaacgctcgtgctcgtcgaggcgctgcctttgtgccgcatcctcgcgtctgattggccgggagaggaggttccgaccgagtttcccctgttcgacgaggaggttgaagcggaaagcgtgttcgcgcgcccgttgcgatgcgccgcggtcatgccgtgcgccgaagcgttcgcgcttctggaagaggtcggtcatgtcggatggtagcgcctgggaacgcgaggcgctttccatcaagcaggttccttcgctgcaagccctgctgcgctgctgcgacgagcggctgctcgtccgtgctatcgtcgaagagcatgcggttctggccggcgattgggatgcgcttccggcgaagcgcaagcgggcggccgagaagcggctggcggccacgttggccacgatgcggggcctgccgctcgacaaaaagggcgcgcggggcagcctgctgctgccgcatgagtcgttcgtgctgcacgcgcgcagcggcttgatcgagcgccacgtgtccgcggcgctgctttcgctcgacgacgtgccgctcgcgcgcagggccgtccagcgctccgacgccgcgccgcccggagaagccgagaggccgcagccgcgtccctacacgctcgatccgtgggagcggacgcttgcgagccgcgtgtggctgggcggttctcggtgctgccgcgagcgctacctcgtgctggcgtcggcgttctgggagatgacgtacttcgggttcgagtacgagcgcgtctgcgcgcgccgtgcagaggagaaggcgcgccgtctggtggggaaggacgtgcctggcgagcgtccctcggagcctccgcgcaccgtgtccgacgagcggcgccgacaggcggaggggttcgggctcgtggagcccgaccgcttcgagctcgactaccgcgatagcatgatcgtgcgagtcgcgcagctcaacgacgacagccgcaaagccctttggctgctgctgctcgacgtggcgtgccgtctgggcaaggcctgagcggcaggggctcgtcgaagcgttcgccggagaggagggaagcggagcgagaacgggaacaggcgcccgcaggcgcctgttcccgaacgaagccgatgccgtcgacgtgctagtcggcaacctcgacgagcgtgatctcgaagttgaggtccttgcccgccagctcgtggttcatgtcgaaggtggcgatgccgtcttcgatggagcgcacgaacacggggaagggctggccgcccggacccatcatgtacacggtctggcctacgggaagctggtcgccgttcgggatctggtcgaccggaacttgctgcaccatggcctcgtcgcgctcgccgtacgcctcggcggcggggatgtgcacgttcttcgtgtcgccctgcgccatgtccttcactgcggagtcgaacccggggatcatctggccggccatgcaggtgaactcgatgggctcgccgcgatcgacggaggagtcgaacttcgagccgtcgtcgagggtgcccgtgtagtggaccttgaccttcttgccttcgttgctcatcaagagctcctttcgagagaatgcaatgcccatcagtctacccgagccgttcgagctttcccgttcgcggcgcgaaacttgctccaagtcgccacaagtccgtaaccgagcctcctgccttcctggaaggaggttgcgaggcccctgctcccttcgccgctgcgctcaggatgacaactcgccccagctccagtctcccgcggtgctaccgtttcgggagatcgcgcacgtcgagcagcgtgatctcgaagttcagcgccttggcgatggcgtcgtggttgaggtcgaacacggcgcgctcctcgtccagctccacgagtcgtgccggatacgtctgcccgtccggccgttcgaggctcatcacatcgcccacggcgagcttgatattggcggggatcttcgcgcgctccacttcgatgacgcgctcttcggtgcgcttctcgtacgcctcgtcggctcctacgcggacgcgcttcgtttcgcccacggccatgtcgcgcaccgcgtcgacgaacgcgggcggcatccacccgtctgcgcaggggaactcgatgggctgcctcgtctgatcgatgaaggtggcgccgtcgtcgaagtagccgcggtaggccaccttcaccatgcgatcctcgttgctcacgcccgttcgctccgttccgcgaggtcggccagcgtcacgcggcgcgcgacgaggtcggcgagcggctccaggaagccctgctcctcgtcggcaaggccgtcgcgcgcgatcttcacgatgcggtcgcacagctcggcgacgggtcgtccgtatacctcggcttcgtagccgcgctccatgagcgcgtcctgcgccgccaggtagtcgtcgcgccgcacgtcggcgaacagcccgtccatcgcgtcgaggctcgtcggcgcgtagaacagccccttgatcagcgccgcgtaggcgatgacgtaggggatgggcatggcgtcggcggggcggatctcgatgtaggtcttgaggcgcacgtcggtgaagaacatggacaccgcgtgctccacctcggcgcgcgtcatcgtgcgcgcggcgtagatatcgccgaacgtgcggtcggagtagcaccaccgctgctgctggcaggggatgaggatggccacggtgtccaggatgtactcagcgtaacggcgcaggtcgaacgagggatccagcacgtcgggcacgaggccgcatcgatcgttgtccacatgctgccagatgtccgtgcgcaccagctgatgctcgcgcggcttgccttcgaacacgggtgcgttgtcgcacataagcgagagcatcggcaccagcgcgaacgccagccgcagcttgcgcaggcagtcggccgtgctggtgtagtcgatggacacctgcgtcgaggcgctgccgcgcatcatgcaggggccgtagatgtcgcgttcgcccagatagaggtccatgaactggtaacggcgcttcgggatgagctccagcgagcgcgccgtggcggagggatggtagccgatcgccagcgccttctctcccgcgggctccagcacgtcggaaaggcgctgcgcgaacccttcgaacgtgtctcgcgcggtcgcgagatcggcgaaggggccggcggacagctcgatctgcgccgcgggctcgatggtgaccgcctcgcttgggcgggcgacgcccaagaggtcgccgtgctcgtcggtggtggtgcgcgggtagtcggccgcgagctggcgcagcacccacgccacgccgtgctcgccgctgtacgagacggggctcaggtcgtcgtgcacgatgatctgctctagctcgatgcccagctcgcccgggccgccgaaggctttgatgccgctttcgaagtagctgacgatggcgttgatgttgctttcgcgtgcgggctgctcctgcccggttgcggctgttttattcatgtagcaagctcctgaacttcgcgtgtcctatgcaatcgtgcgttactttgtatacaataccgctttggtcgccgagcatgtcgacatgtcggcaaatccatattgtttcgctgccctactcgaagacgaggcccggtttggacgctcatatcacaaaacgcacagcgatcctgctgctgctggatatcgtcgcgacgtacgccgcgtactggctcgcatcgctgctcaccgacgtcgagggcgaagtgttcgtcaacaacgagatctacttcatgctgggcatcctcgcactcatcaacgttgccgtgctggggctgttccatctgtacaacaacctctgggaatacgccagcgtcgacgaagccatccagatcgtgctggccgtggtgctgtcaaccctggtgggcgccgtgttcctctggatcatcgacgtgcggctgcccatccgcgtgttcttcgtctcgtgtttcatgctcatattcttcatgggcggtatccgcctgatcttccgcgtcatgcgccagaaaaggcgcgcgctcgtctccacgcagcgcgcgtgcgaccggccgcgcacgctggtggtgggcgcgggggagacgggctcgctggccatcgggcgcatggcctcgaaggacccgctcatgccgggcatccccatcgtggccaccgacgacgaccccaccaagcgcggctcgcgcatccacggcgtaagggtggccggttccacggacgacatcgtcgacctcgtggacaagcacaacatcgaccagatcgtcgtggccatcccgtcctccacgcccgaggagcgcaagcgcatctacggcgaatgcacgaagaccgactgcaagctgcgcaccctgccgaacgtgcgcgagctgtcgctcgacgagatcggcgacgtgcgcctgcgcgacgtggacgtggccgaccttctgggccgcgaggagatcatcctcaacacgcgcgcggtgtcgggctacatcgccggcgagaccgtgctggtcacgggcggcggcggctccatcggcagcgagctgtgccgccagctgtgcaaggtggcgcccgcccgcatcgtcatcttcgacatgtacgagaacgacgcctacatgctgcgcaacgagcttttggccgaatacgacgacatcgacctcgtcatcgagatcggcaacgtctgcgacgaggcgcgcctgaacgaggtgttcgcgaagtaccgccccggcgccgtgttccacgcggccgcccacaagcacgtgcccctcatggagcaatgcccgcgcgaggcgctgcacaacaacgtgttcggcacgctcaacgccgtgcgcgccgccgacgcctacggcgccgcgcgcttcatcttcatctccaccgacaaggccgtgaaccccaccagcgtcatgggcgccacgaagcgcatgggcgagatggtcatgcagtactacgcgcgcacgtcgaagaccattttctccgccgtgcgcttcggcaacgtgctgggctcgaacggcagcgtcatccccgtgttccagcgccagatcgccgcgggaggccccctcaccgtcacccatcccgacatcgagcgcttcttcatgaccatccccgaggcgtcgcgcctggtcatccaagcaggcggcatggcgaagggcggcgagatcttcattctcgacatgggcgagccggtgaagatcgtcgacttggcgaagggcctcatccagctgcagggcctcacgcccgacgtggacgtcaaaatcgtgttcacgggcctgcgcgagggcgagaagatgtacgaggagctgctcatggacgaagagagcacgctgcccaccgacaaccactccatcctcatctccaccggccaggagatcagctacaccgaagtggctgagaaactggacgagctggaagccgcactcaccctcaccgacgaggaagccgtccacgtgctggagaaaaccgtctgcacctatcgccacacccccaacaaggtatcctgaagaggcgcgcctcgaggcgcgttcggacatggacgcgtcgcgtgcccgctgcattgtcgcccgaaaaacacggaaaacggcctccaagcgtgtttttcgggcgacaatgcataagcggttggttcgcgccaagacgcgatcatgatataattacgataaaattttatcatgaaggaggtgcctatgaacatcaggccgatatcggatcttagaaaccgctacgcggacgtcgagcgggatgtcatcgagggcggtcccgttttcctgacgaagaacgggtacggctcgatggtggtcatgagcgtagagcaattcgagcatatcaacggcggtgtcgagttcgctctcgatgcggccgatcggcaagctgcgacgacgtctctgcgctacacgcatgaagaagtgttcggttccattcgggaagggcttcgcaatggacgagaagccgcggcgctatagacttgagtacctacctcttttctgggacgacctcaacgaggccgtctcctatattgccgatgtgctcaaggctccggaagctgccgagcgcttgatcgacgcaaccgaagcgggcatcttggctcattcccgaaatcccacgcttgcgacgacgtacaagacggcgaagcccagacctcttccgtactactggttcgaggtggggaactacatggtgttctacgtcgtgctcgacgacgtgatggaggtacgccggttcctgtacggcgcgcgcgatttgacgaaaatgcttccgtgaggcacggttgccgtttccgcgcctcgagctcgtccgccgcattatcggccgaaaaacacggttttgcgcataaatccgtgtttttcggccgataatgtgtatgggggagccgtcaatttgcgcccgaatcttgtcaaacgcgccgttctttcataggatggacaacagcattcgaaacgcctcaattttgtgcatgcgcacaaattacaggcgacgcaacggcttgagcgtcgcgtccgcgcatcggacgacgggtacgaaggggatcgacatggcgatcacgacaggcatcgttggagcggccggcttcgccggcatcgagttgaccaggctcgcgttgcgtcatcccgacctcgatctgcgcgtggtcacgtccaacgagttggcgggcacgcccgtggccgcggaataccccggcttcaccggtgccaccgatctcgccttcgccacgcacgacgacccagcgctcgacgcgtgcgacctcgtgttcctggccgtgccgcacaccgcggcgctcaagatggcgccgcaactcgtcgcgcgcggcgtgacggtggtcgacctgtcggccgacttccggctgaaggaccccgccgtctacgagcgctggtacgccacgcctcacacggcgaccgacctgctgcaacgcgccgccttcggcctgcccgagctattccccgacgatctcgcgcgcgtcgcggccgcccatgcggcgggcgagggcgtgctcgtggcctgcgcgggctgctatcccacggccacgtcgctcgcggcggcacccgccgtccgcgccgggctcgtgcggcccgacgccgtcgtggtggtcgacgccatctccggcgtcacgggcgcgggcaagaaggcctcggcgcgcactcatttctgcttcgccgacgagaacctcgaagcgtacggcgtggccacgcaccgccacacgcccgagatcgagcagatcctgggcttggaaggccgcctcgtgttcacgccgcatctcgcgccgctcaatcgcggtctgctgtccaccgtgaacctgccgctcgcgcccgacgcgcccgccgacgcgggcgagatcgtggagctgtaccggaacttctacgccgacgaccccttcgtccacgtgctggacgccggcgccatgccgaagacctcctcggtggcgggcacgaactacgcgcacgtggggctcgctgtcaaccaggcggcgcgcatgctggtggccgtgggcgccatcgacaacctgggcaagggcgcggccagccaggccgtgcagtgcgcgaacgcggtgctgggcttgccccagacccgcgggctcgaaccgatctccgttcccgtgtgacgcgaaccgcgcgcgccacgcactagccgcaagccgcaacagaaagaagccgctatgaccgaccaaccgatcgctgcaacgcatcccgcccaaggcggcgtgacggcggcgcgcgggttccgcgcgtccggcgtgcacgcgggcttccgtaaggatcccgagcgcctcgacctcgcgctcgtggtcgccgacgaaccctgcgcgtgcgcggccgtgttcaccaagaacgtgttctgctcggcgccggtcatcgtatcgcgcgcgcagctgggcgccgaccagccgggcgagcccgcctacggcacggcgcgcgccgtggtggtgaactcgggcaatgcgaacgcggcaacgggcgagcccggcttggaggccgcgcgcgagacggcgcgcatcgcgggcgatgccgtgggctgccccgcatccgaggtgctggtggcgtccacgggcgtcatcggcgtgcagctgcccctggcgccgttcgggatcggcctgcctgcggcggcgtcgctgctgtctgccggcggcggcgcggatgcggcgcgcgccatcatgaccaccgacacgcgtccgaaggaggccgccgtcacgttctcgggcgacggaatcggctacgacggctgcacgttcacggtgggcggcatgtcgaagggctcgggcatgatcatgccgaacatggccacgatgatcgccgtcctcaccaccgacgcgccggtgtccgcgcccgccttgcacagggcgctcgtgcacgccgtgaatcgcagcttcaacaaggtgacggtggattccgacacgtcgacgaacgattcctgcttcctcttcgccagcggcgccgcagcacctgcgggcgcaagcgcgttcgatccggacggcccggccttcgcccgcttccaggcggcgctcgtcgaggtgtgcgagacgctggcccgcatgatggcggctgacggggaaggggccacgcgcctggtcaccgtgcatgtgaccggtgctgccaacgacaccgacgccgacctggccgcgcgcaccgtggcgaactcgccgctcgtgaagacggccgtctgcggccgcgacgcgaactggggccgcatcgcggcggccatcggcaagtcgggcgcggtcttccgccaggaggatgcgtccatcgacatcatgggcctgccggtgtgccgcggcgggcttgcgcaagcgttcgacgaggacgaggcgctgcgccgtttcgagcagcccgagatcgtcatcgacgtcgacctcggcgcaggcgaggcgaggaccacggtttggacatgcgatttcacacacgagtacatcacgatcaacggagactatcgctcatgaagtacgcgaaggacacccgcccgaagggcgtagcgaacaaagcggcggaggtgctggtcgaagcgcttccctggatcaagaacatcaccggcaagaccgtcgtcatcaagtacggcggctcggccatggtggacgagcagctgcgcgccgacgtgatgaacgacatcgtgctgctgaagatcgtcggcgtgaatcccgtcatcgtgcatggcggcggcaaggccatcaccgaggccatggatttcctgcagcttcccgtggagttcaaggacggtcagcgcgtcaccacgcccgaggccatggacctcgtgcgcaccgtgctgatgggcaaagtgaaccaggagctggtggaggctctcaacgagcacggcaacttcgccgtgggcgtcagcggcgccgacgcgggcgtcatcgtggccgaacaggccagcccggagctgggacgcgtgggccgcatcacgcgcatcaacagcccgcttctggacgacctcgttgccggcgactacatccccgtcgtggcttcggtggcgctgggcgaggacggcggcttctacaacgtgaacgccgacatggtggcgggccacatcgcggccgccatcggcgcgcacaaggtggtgttcctcaccgacgtggacggcctgtacgagaacttcgagaacaaggactcgctcatctcgaacctcacgctgttcgaggcgcagtacatggtggagaacaacatcgtgtctaccggcatgatcccgaagctgaagtcgtgcatccacgcgctggattcgggcgtgttccgcgcgcacatcatcaacggcatcaccccgcactcgctgctgctggagcttctgaccagcaccggcgtgggcaccacgatgcactccacggaggagtcgtgcacgttcgacacccatcctttgggcaacttcgcctccaagttgctggagaatcgccagcatgctgccagcgcgacgccgaacaacaagattttctaagcgagcgaaagaaggacgaccatgggctttatcgaggaacagcagcttgaatccgcatacgtgatgggcacgtacgcccgcaagccggtggagctcgtgcgcgggcgcggcatgcgggtggaggatgcggaaggccgcacgtacctcgacttcgtgtcgggcgtgggcgccgtgagcctgggccactgccatccggcgctcgtgtcggctatcgaggagcaggcgagcacgctggtccatgtgagcaactactactacatcgagcatcgcggcgaggtggcgcacctcgtatccgacttgctgaacgagtgcgtcgacgaggccgagcgcgagccgtggcagagcttcttcgcgaactcgggtgccgaggcgaacgaatgcgccttcaagctggcgcgactgcacgccaagaagcgcgcgatggctgcggccgaggccgccggcgccgacgaggacggagtgcgcgccgccgcagccgccgcgccgcgcctcatcgtcacgctcgacgccagcttccacggccgcacgctggccacgctggccgccacggcgcagcccgccaagcaggaggcgttccagcccctgcccgacggcttcgtccgcacgcccatcaacgatatcaaggcgctcgagtcgctgttcgcctcccagggcgacggcatctgcgccgtcatggtggagtgcgtgcagggcgagagcggcgtgcatccgtgcgagcccgagttcctggccgcggtgcgtcgccttaccgccgagcgcggcgcgctgttcatgtgcgacgagatccaatgcggcatgtaccgctgcggcacgtatcccttcgggttccagcacttcggcatcgcgcctgacgtggtgaccattgccaagggcatcgcctcgggcttccccatgggcatgtgcgctgcgcgcgcccaggtggcggcgtcgttcgatccgggcgaccacggctccaccttcgggggcagctgcctggccgtcgcggcggccgaggccaccgtgcgggcgctggcggccgaggacgccgccggcaacgccgagcgcacgggcgcgtacctgcgcgagaagctggcggcgctgccgcaagtggaagaggtgcgcggcctagggctcatggtggcctgcgacctcgccgagggcgtgagcgcccccgacgtggtgctggccggcctggacgagggcctcctgctcaacttcaccggcccgcgcacgctgcgcttcctgcctccgctggtgtgttcgaaggaggacgtggacgtgctggtgcagaagcttgcggcgctgttgtcctgaaagggcagctgtcatcctgagcgaggcgccatagactgtcattctgagcgaggcgcgaagcgcggagtcgaaggatcccgagcggcgacagcaggaagtctcacggttggcaccttgcggatccttcgacttgctcaggatgacagggccgctgcgctcgtttaggataacgactgcaaggacgttcgtcgaaaatctttctgcactttttgaaattctggggtcggaacgctcacggatagggtactatttaatgcatattttcgtcgggtcttgcgcaattctgcataccccgcgaaggtacttgtgatcggaaccgtatgtgatcgttcttgaacgggaacagagagtatcgagggcatgagaaaacgtcaacaacggcacgacatcattcgcgacatcattcgcgaacataatgtcaagacgcagcgcgatctcgccaatcagctgcaggccgctggttacgaatgcactcaagccacgatctcccgcgacatcatggacatgggcctggtgaagtctcgtgagggctattacgttctccctgaggaaatgcggctccagcgcatggtatccgaattggttgaagaggtgcacgtggcaggcaacatggtcgtagtgaagacgttctccggcggagcagccggcgtctctgctgcgctcgacaaggccagcctgcgcggagcactcggcacggtggccggcgacaacacgatcatgatcgcggcggagagccctgaggctgccgtcgaagtcgagcgcgccatcgaccgactgcgacgacgctagtcgtcgactatatttcttggcggggacgcttttctccctgcactcatccccacgcttagtacaagcaacagcgtccgagccgcccggctctgatgcctgtcaccacgaaaagccgtggtgcgcacgacgacagccttgcgcggtgagaaccgcgatgggcgcgcgcatacccctaccgtccggcgagcgctgggggaggcgccttcgcagccgcaccatgaccgggcatcccgacgacaaccgaacacgggggaaggaccctaccatggctcagcagcagactcagcaaacccagcagaaggacaaagcggtactggcgtattccggcggactggatacgtccgtgtgcatcaagtggctccaggaggagaagaacctcgacgttatcgccgtggtcggcgacgtgggacaggagcatgagggccttgagaagatcaagcagaaggcgttgaaaaccggcgccgtggaatgcctggtcgtggacatgcgcgacgtgttcgcccaggacttcctgtccaaggcgctggccgccaacgccctgtacgagaacaagtacccgctcgtgtgcgcgctgtcccggccgctgatctccaagcaccttgtggacgcggcgcacaagttcggcgcgaagtacatcgcgcacggctgcacgggcaagggcaacgaccaggtgcgcttcgaggcgagcatcctcatgcttgatccggacatcgagattatcgccccggtgcgcgaatgggatctgcacacccgctccgaggagatggaatgggctcaggcgcacggcatcgaggttcccaccacgaagaagtcgccgtactccatcgacgataacctgtggggccgggccatcgagtgcggcgtcctggaggatccctggatggagccgccgacggacatctacacgatgacggtcgatcccaccgaagctcccgacgagccgcagtacgtggagctcgagttcgcgcgcggtctgccgtacgccatcgacgggagccagaagagcttcctcggtatcatctacgcgctgaacgagatcgccggcaagcacggctacggccgcatcgacatgatcgagaaccggctggtgggcgtgaagagccgcgagtgctacgaggtgccgggcgcgctgtcgctcattcaggctcacaaggcgctggaagacctggtgctggagcgcgaggtgctgcacttcaagctgggcatggagcaggagtgggcgaagtgcgtgtacaacggccagtggttctcgccgctcaaggaagccgtcgacgcgttcctcgcctccacgcagcgctgcgtggccggcaccgtgaagctcaagttctacaagggatcctgcaccgtggtgggccgcaagagcgcctactcgctgtacgattacgcgctggccacctacgacaaggacgactcgttcgaccacgcggcggccaagggcttcatccagctgcagacgctgtcggccaagacgtgggcctcgaaccgtcggcaggagggcgcaccggccgagctgttcgacgcgcagaagaaggtcggcccgttgacgaagggtgcgtacgaggacgtgacgccggtgtggaagcaggtggccgaggctgagaacgcggcggtcgtcgaagaagcggaagcggccctgcagggcgctgccgagaaggcttaagggggatgctatggctttgtggtcgggcagattcaccgagaacgtgagcgagttcacccaacgcttcggcgcatcgctgccggttgacaaggcgctgtatgcgcaggacatagccgggtcgcaggcgcacgcgcgcatgctggcgtcggcgggcgtcatcgagcccgccgatgcggaggccatcgtcgaggggctcgaccgcgtgaaggcgcgcatcgaggcgggcgacttcgcgttcgacatcaacgacgaggacatccacatgtcggtggagcgcgcgctcatcgccgacatcggcgacgcgggagcgcgcctgcacaccggccgcagtcgcaacgaccaggtggccaccgacacgcgcctgttcgccaagcagcgctgcgaggacctcatggcggcgaacgtggcgctgcgccaggcgctcgtccggcaggccgaggcgcacttcgacgtcgtcctgcccggctacacgcacatgcagcacgcccagccggtgctgttctcgcaccatatgctggcctacgtgtggatgctcgcgcgcgacttcgagcgcctggcggccgcgcgcacggctgccgacgcgagcccgctgggttcggcggcgctcgcgggcaccacgtacccgctcgatcggcagatgacggcggccgagctgggcttctcgcgggtgatcccgaactcgctggacgccgtgtccgaccgcgacttcctgctggacctgtcgtacgcgtgcagcgtgtcgtgcatgcatctgtcgcgcctgtgcgaggagatcgtgctgtggtccagctcggagttcgggttcatcgagctgtccgacgcgttctccacgggatcgtccatcatgccgcagaagaagaaccccgatttcgccgaacttatccgcggcaagacgggccgcgtggtaggcgacctcgtggcgctgctgatcaccatgaaagcgctgccgctggcttacaacaaggatttgcaagaggacaaggaaggtgccatcgacgcggccaagacgctggaggattgcctcgtgtgcgcggccggcatgatcgagacgatgcgcgtggtgcccgaggccatgacggcgcaggcgaagaagggctacctggcggccaccgacgtggccgactacctggctaagaaggggatgccgttcaggcgcgcccacgaggtggtggggcacctcgtgctggtatgcgagcagcgcggctgcgacttggacgacttgacgctggccgacttcaaagccgaaagcgacctgttcgaggaggacatcacggcctcgctcgatctggagagcatcgtggcggcccgcaccaccgagggcggcaccgggcacgcggccgtgcgcgcgcagctggcgcttgcgaaagacgcccttgcggccgacgaggcggtgcttgcgggataagcgcagcgccttttggcgcgggggcaccgcctgaggtccgagcgtccttcgccgcgccgatcgcacgctgcgagcgtctcgaatcggcgcggcacacgcgcaacggaccgcaagcgggctcccgcgcccgagaaaaaagcgctgcaccctgcttgcatcaaccacgttttgagctcccgaccgggcgttttcccgtgtgacctttttccaacgaacttgtgttgattcatgggggcctgtgccccgatgttacaatgggcggagttttttggaggtgacacgtggcttcacgttctataaagaataggccggggatcaagaaaaagcatccttccatcggcttccttgcggtgttcacggtctttttggccgtgatcgtcgccggcttctcaggcgtctacgccctcggttcgtcgtggatcggcgaccttgaggactacgacgtgtccgatgccggccagctcaactcgtcgctgccgtcgatcatgctggcgtcggacggtacggagctcgcccgcttccaggtcgagtaccgcgaccccgtcgagctcgaccagatcagcgagtacgtgcgcgagggcaccgtggctaccgaggacgagcgcttctacgaacacggcggtttcgacctcgcgggcatcgcgcgcgcggtgtacgtgaacctcaccggttccggcaaggagggcgcgtccaccatcacgcagcagctcgtgcgcaacactatcctggccgacgagatgaacgatatctcgttcaagcgcaaggtgcgcgagatgtatctctccgtcaagttggaggaacagtactccaaagacgagatcctgctcatgtacctcaataccatcaactacggttccggcgcctacggcatcgaagccgcgtcgcagcgctacttctcgaagcatgcaagcgagcttacgctggccgaagcggccgcgctcatcggcattccgcagtcgccgacgtacaacaatcccatcgaccatgaggacaactgcctcgcgcgtcgcaacctcgtgctggatcgcatgctgacgaacggctacatcacccaggaagagcacgatgctgcccaggcggagggcatcgtgctcaacacgaccgagaccacggtggatggcctggagaagtatccttacttcagcagctacgtgcgcgacctgctcatggatcccgacggcgactaccgctactccgaggacgagatcttcaagggcggcctgaccatccagaccacgctggacgtcgactcccaggaggccgccgaggccgccatcaaggagaagcgggagagcctcgatccggccatcaacggcgcgctcgtggccatcgagcccgaaaccggctttattaaggcgatggtgggcggcgacgactgggagaacaacaagctgaacctggccacgggcgagcgcggcgttcccaatccgggccgtccgtccggctcctcgttcaaggtgttcacgctcatcgcagcgctcgaagcgggcatcagcccgcagacgatggtggactgctcgtcgccggccactattcccaatacgggatacacgggagccaacgccctgcagaacatcgacaacaacaactacgggaccatcagcatccagcgggcgttcgcgaagtcgtcgaacacgggcttcgtgcgcctcgagatggcgctcggcatcgacaaggtgatcgcgacggccaagaagatgggaatcacctcgacgcttgaggcgaacccctcgctcacgctgggccagtcgaacgtgacgatgctcgacatggccagcgcctacgccatcatcgccaacggtggcgtgcgcgtcgatcccacgcccgtcctcaccatcaccaactcgaagggcgaggtgatcgtcgacaacaccacgcccgatacctcgctttccaagacgcatagcgagcaggtcatctcgcccgaggtcgcccatgcggccaccgaggtcatgaagaccgtcgtcaacacgtccgagggcacgggccaggaggcggcgctgccgaacggccaggtggtggctgcgaagacgggcacgtccaccgagtacaaggacatcacgttctgcggcatcacgccgcagatggcggtggccgtctggttgggcgatcccgcgaatgtcaaaacgctgccggcccgtgtgggtgccggcgacgtgttccgcaccttcatgagcgcggtgctcgacggccagccgaccgagcagttcccacaggcggccgatcccacgtacaagaacttctccgatccgacctaccatgtgggagggtccgctagctcgtcgaacaccgacgacgagaaggatgacgagaagaagaaggacgccgaggacaaggacgccgacaagggcaaggacgatcctgcgccgacgccgacgccgacgcctactcccacgccgacgcccacgcccgatccgactcctactccaacccccgatccgacgccgaagccggatcccgatccgacgcccactcccacgccgacgcccgaccccggaggcacgacggacaagccggcaagctaggttgcggacccggaaaccgttccgatacgaacgcgtcgcatccccggcgcgacggcgggcgaaccgctacgatagttcaacgatgattcgatgcaagagagcaggtacgacatgaaacatacgagattcgccaaggtgctggtcgccatgttcgcaggcgtcttgatggtggcggctctgggcggatgcgcgcagcaggatacggcggccgcgcaacagcaatccgagaaccgtcagtacatgactcaggtcaaccaaactatggacgacctgaagagccgtctggagagctttaccgatgcggtatcgcgcggcgacgtggtgggcatgcgcacgcaggccgacaacgcgttcaaggctatcgacgacctgaacaacctcaacgtccccgacgccctcaaggatatccagaaggagtacgtcgacggcacggccgatctcaaggacgcgctgaactcctatatcgacctgtatacggaaatcgacagcgccaccgaggaacagcccttcgactattccacgtacgatcagcgcatccaggatatcaagtcgaagtacgacgagggcatcggcaagctccagtcgggcgacaacaaggccagcgagctgccggaataacctcgactgacacgcacactgctttgagcggcggccctttcgggctgccgctttcgcattcgaccacgcttgcgtccgctcagtcgtattgccgggttttcggctgccgtctatcggtttcgctcatgttaattctgcgcttgctgcgggggcgcttggcggccgagggtataatggaaagggagaatactatacattttcccacatgaggacgaggagcgaacggtgagcgaaaagacgcagggagccaggaacatcgccgaagaggcattcggaaacgaacgcaagttcaagcagctggtgggtgcgctgtcgggtccgtcgaggcgcgagcgccagaacgcagcagcggcgctctccttctttgccaaggatcatcccgatttgatgatcccgttcggcgctgccgtcatcgacgcgctgaatcgccccgaagcccagacgcgctgggagtgcctcgatatcctcaccacgatggtcgaccacgattcccgcacgtgcgacaaagcggttcccggagccgaaaccgcgttgttcgacgaggagagcgggccggtgcgtttggcggccatgcggttcctctgcaagctgggcgctacgacggagaaccgttctgagcgtgtgtggcctctcatcgacgaggctatccagtgctaccatggcgacctggagttccaggatatgctggtgtcggttatcgacttctcggcgggcaagctggcaccttccgtaaagaaagagctgggcgcgcgcatggccttcgacgcctccaacggcaaagggccgctcaagcgccgtgcgcagcaaatcatcgacaacgtgcagaactagcgcacggcattcctacgagccttccgggctcgtttcgtcgcgtcggcccagaaggcggcgcaaaggggcatcgttcgaacaattgcagaaggagaaaacatggcatcgcataccgtggccctcgtacccggtgacggcatcggcccggagacgtcggccgccatgcaacgggtggtggaggccagcggcgccgatatcgtttgggatgtggccgaggcgggggcgcatctcgtggaggagcacggcacgccgctgcctgcttctaccatcgaagcggtcaagcggaacaaggtggccatcaagggacccgtcgccacgccggtgggcacgggattccggagcgtgaacgtggcgttgcgccgggaactcggtctgtacgcgtgcctgcgccccgtcctgtccattccgggggcgggcgggcgctacgacggcgtggatatcgtcatcgtccgcgagaactccgaagacctgtacgcgggcatcgagttcgaagagggctccgagggcgcccgcaagctgatcgcgctgtgcgaggaagagggcgcgggcgctatccgtcccgattccggcatctccgtcaagccgatctcgaaggcggcgtccgaacggatcgtgcgtttcgcgttcgactacgcgcgcaggcacggacgccgcaaggtgaccgccgtgcacaaggcgaacatcatgaaacataccgacggcttgtttttgcgtgcggcgcgcgaggttgccgcagagcgcgccgaagatgcggcgttcgaagagcgcatcgtcgacgcgttctgcatgaacatggttatggatcctgcgcagttcgacgtggtcgtgttcccgaacctctacggagatatcgccagcgacctggccgcaggtctcgtgggaggcctcggcatcgcgccgggcgcgaacatcggcgacgagtacgctgtgttcgaagcggtgcacggctcggcgcccgacatcgcggggcaagacaaggccaaccccaccgcccagatactgtcggcggccatgatgctcgaccatctgggcgaagcggaggcggccgagcgcatccgccgcgcggtgcgcgccgtgtacgcggagggcgcgcacctgaccgccgacattcgcaaggccaccggctcgtccaagccggcggcaagctgcacggaattcaccgatgccctgatcgcggcattctaaaacgttggagtaaggagaacctatgagccaagagaacagccgattcgcttcgatgctgaacgtgaacggcacgacgtacgcctactatccggtctcggccgtcgccggctcggagcagctgccgtactcgctgacggtgctgctggagaacgtgctgcgcaacgccgaaacgccggaggcggccgaggagctggccgcgcgcatcgtggaagcggggcgtgcgggcgtcgtgggcagcgagatcgagttctcaccggcgcgcgtgctgttccaggatttcacgggcgtgcccgtgttcgtggacttcgccgtgatgcgcgaggcctgcgctcagctgggcggcgacccgacgaagatcaacccgcagattccctgcgaccttgtgatcgaccattcggtcatcgccgacgtcgccggctgcgcgggcgcgctcgcgcagaacatggagctggagttctcgcgcaacaaggagcgctacgacttcttgaagtggtcgcgggaatcgttcgagaacgtgcgcatcgtgccccccggagcgggcatctgccaccagctgaacatcgagcagttcgcccacgtgaccatgaccgccgacggcgcgcccggcgagcagccaacggcgtacttcgacacgctcgtgggcaccgacagccacacgcccacggccaacggcatcggcgtgctgggctggggcgtgggcggcatcgaggccgaagcggccgcgctgggccagcctatcaccacgctcgtgccgaaggtggtgggcgtgcgcctgagcggcgagctgggcgagggcgtggcagccatggacgtggcgctgtcgttcgcgcagatgctgcgcgcgaagggcgtggtgggctgcttcgtggagtgcttcggcccgggcctcgacgcgctcagcgccacgcagcgcacgtgcatctccaacatgacgcccgagtacggcagcacctgcacgctgtttccggtggacgagcagacgctgacgtatctgcgcctgaccggccgcagcgagcagcaggtggcgctcgtggaagcttacgccaaggcgcagggcttctggaacgacgcggacgcgcccgcgcgcacgtacgccgaggtgatcgagttcgacctgggcgccgtggagcgctcgctggccggcccgtcgcgcccgcacgaccgcatcccgctgtcggcggtgcaggagcgcttccgcgccgtgtgcgacgagcgcggcctcgacctgtccaagcgcgtggcggtcgatctcgacggcgaagcgtgcgagctgacccacggcgcgctggccatcgcggcggtgaccagctgcacgacggccaccgacccctcgatgatgctggccgcgggcctcgtcgcgaagaaggccgccgacgccggcctcaagccccagccttgggtgaagtgcgtgctggctccgggcagcaaggccaccgagcttctgctggagcgcgccgggctgctggacgggctgcgggcgctgggcttctacacgtgcggcttcggctgcatgagctgcatcggcaactcgggtcccatcctggacgagctgcacgaggtggccgaggacatcgagctggccagcgtgctgtcgggcaaccgcaacttcgagggtcgcatctcgcccgatgtgtctcagaactacctggcggctcccgccgcggtcatcgcctacgcgctggcgggcaccatggacgcggacctcgagcacgacgcgctgggaacgcgccccgacggcaccccggtgctcttggccgacatctggcccagcgacgaggagatcgccgcgctggtggcccagcatgtggactgctccctgtacgaggagggcacgcgcggcctgtacgacggcgatgcggcctgggccgcgctgggcagcgaacccagcgacacgttcagctgggacgacgcgtccacctacgtgcgccgcgccccgtacttcgacggcatggagcgcgagccctccgcgccgaagcccgttgaggccgctcgcgcgctggcgctgctgggcgacttcatcaccaccgaccacatctcgccggcgggttccattgccgccgactcgcccgcggcccgctacctggaggagcgcggcgtggctccggccgacttcaacacctacggcgcgcgccgcggcaaccacgaggtgatgatgcgcggcaccttcgccaacgtgaagctgcagaacaagctggccgaggggaagaagggcggctggacgcgcgacttcgccaccggcgaggtgcgcccgctgttcgacgcggctatggactatgaggctgcggaaacgccgctcgtggtggtggccggcaagatgtacggcagcggctcgtcgcgcgactgggcggcgaagggcccggcgcttctgggcatccgcgccgcgttcgccgagagcttcgagcgtatccatcggtcgaacctcatcggcatgggcatcctgccgctgcagttccaagagggagagagcgccgagagcctgggactggacggttcggagctgtacacggtggcgcccatcgacttctcgcaggggctgcccgagccgcgcgtggtggacgtgaccgccgagcgcgcggacggccagacgacgacgttccgggcgaccgtccgcgtggacacgcccaccgagggccgctactaccagcacggcggcatcctgccgttcgtgctgcgcagccttttgtaaagaagaggtaacgtcggcgcccgattgcgaagagcggtcgggcgctttgtcgtatactggatactttaactatcggtacgcttgggaagggatgccgtgaaacagacatccggattcgatgcgctgatcgaagcgctcaaacaatcaggggtaaacgtggacggtcggttcgatgccgaccatgaagcgccgtcgggcggggcaggacgcgccggaggcgggggcggcggcgctcagcctccgcacgtgaacgtggagatcccgttcgccgaccgcatggcctcgtggggcaaacgcgccctcatcgtggccgccatcgtcatcatcctcgtcggcctcggggcctactggtggttccatccgcccatcaacatccactcgaccgatacgtggatgttcgtggccgtgttcatcctgctgccgctgttcctgctgttctggagccggtcgtacagctacaagaacggcacgagcaaggtggagccgaacgcgggcaaggccaaggcgttcaagtgggcatcgtacctgccggtgctcgtggccgtgatcggcgtgatcggcgccgtggcgtcgctgtcgatcttcccgggcaacgcggcgaagtacgccaacgtgctgcagacggagacggagacgttcgccgacgacatcaaggaagtcaactactccgagatcccggtcatcgaccgcagctcggccatcctgctgggcaaccgcgagatgggctccatccccgacttcgtcagccagttcgagatctcgccgctgtacagccagatcaactaccagaacgccccggtgcgcgtgagcccgcttgcgtacgccgacctgttcaagtggttcacgaaccgcgacggcggcatcccggcgtatgcgctcgtgaacatgacgacgcaggacgccgagatcgtgcggctcgacgacagccccatctactactcggagtctgagccgctcgcgcgcaacatcgaccgccacgtgcagctgagctacccgttctacatgttcgaccagaagtcgttcgagatcgacgacgacggccacccgtggtggatctgcccggtgcagtcgcgtaccatcggcctgttcggaggcaccaccatcagccgcgtggtcatggtggacgccaccacgggcgagacgcaggacctggccatcgaagacgtgccgcagtgggtggatcacgcctatcccaccgacctgctgctggagcagtacaactggtcgggcaagtacaaggacggttggctgaactcggtgctgggccagcgcaacgtcgtgcagaccacgccgggaaccgacggcaacttggggtacaactacatcgccaaggacgacgacgtgtgggtgtacacgggcgtcacctcggccacggcggacaactccatcgtgggcttcgtgctgatcaaccagcgcacggccgagtcgcacttctactcggtgtcgggcgcgaccgaggattcggccatgcagtcggccgagggccaggtgcagaacctgcgctaccaggcaacgttcccgctgctgatcaacgtgtcggggcagccgacgtacttcatggcgctcaaggacgacgcgggcctcgtgaagcagttcgccatgctcgacatccagcgctaccagaacgtggccgtgggcaacacggtggccgagtgccagaaggcctaccaggcgctgctcgccacgaacggcgtgctgaccgaggagggcgtcgacaccggatcgcttgagatgcagggcaccatctccaccatcgcccaggcggtgatggagggcaactcgcacttctacgtgacgcttgacgagggcgagggcatctacgacttcgcgctgcccggcctcatcgagatcgtcgggtacaaggaaggcgacaccatctcgttcacgtacgtggaagccgagccgacgaaccccgtcgaggagatcctcgatagctcgaaggcgggtacgagcgagaaggctgccgagcaaaccgcgaaggaagccgacgcgacggccgacgccaagggagacgcggcgtaggacggcgtcacggtgttggcgtggcgcgtggaaaacgcttgacattcgttttgggtagggtagaataagcgagttgtttagtttgttccgctgcccaagacagctggtaccgatgaggtttaatcgcaggaatgcggcccgccgaggtggttctgataagtttcgcgctttgacgaccccctgctgtcacgagacggcggggggtcgtttcttgttttcaagcgacgattcccacccgcgaggggcggaacccgagtttgagaagaaggaggtgtactacatgcccaacgcaaagaatcaagagatgctcacgaagatcaaaggcgacctggacggcgtttccgccgtgtgggtggtcgactactgcggtctgacggtgaaggacatccaggcgctgcgtacggcgatccgcgaatccggtgcgagcttgaaggtgtacaagaacacgctcatgcacatcgccctggaggagtcgaacctgcccacgctcgacgacatgcttgcgggtccgagcgcgttcgtgttcgccggcgacgatgtggctgcggctgccaaggccgtgaagacgttcgccaagaccaacaagaacctggagatcaagggtggcttgatggaaggcgcgcaggtgtccgccgcacaggtggaggccatcgcttctctcccgtctcgcgaagagctcctggctcagatcgccggcgccatttccggtgtcgctcgcggcctcgctgttgccctcaacggcgtgccgagcggtcttgctcaggtcacgaaggctgtggccgaccagaaagaagctgcttaaacgcagcgctggcagcgtgatgagcgctgcctaaccgaaagctgaaacgtaccggtcggatgagatccgaccactttgaaaggaactaacatggctgttactcgcgaagagatcattgaggccctcaaggagatgtccctgctcgaggcgtccgaactggtgaaggacatcgaggagacctttggcgtttccgccgccgcccccgtggccgtggccgccgccgctcctgccgagggtggcgctgccgccgaggagaagaccgagttcgacgtcgtgctcgagggcttcggcgacaacaagatcgccgtcatcaaggttgtccgtgagatcacgagcctgggcctgaaggaggccaaggagctggtcgagggcgccccgaagccgatccaggagggcgtgaacaaggagaaggccgaggagatcaaggccaagctcgaggaagccggcgctgccgtcaccatcaagtaacttccgttcgctggtctgacgaccgtcgaacgtgcctgacgctgagcgacccccagattctgggggtcgctcgctgtctgggtgcccgagctttggcgcggaaacgccctggccccggacggtgctccgcgccgctgcggcaggcgcttcaccttactgacggaatggcaacgaaacggacgctggcgggggtgcgcgcttatagtgggtgccaaacgctaaggaaaagaaggtcactatgcaaaccggttacttcaacgccgcttggcaggatatcaagaactccccgggctggttcggcaagctcgtgctgttgtcgctgctcagcctcattcccatcttcggctggctcgtcgtgctgggctacctgtacgggtgggcgcgcgacatcgcctggaacgtgcacggacccctgccgaagcgcatcttcggcaacgaggacggcaagctgtacagccgcggcttcttcgcgatggtcatcggcttcgtgtgcatgctggcgccgtggatcctcgaagcggtgtggggtgccatcaccggcatgggcaccgcctggtcgggacgggggcacggcggcctgttcatgttcgtcggtctgtccacgatgatattctccctgctcatcatcgcagcttcgttcttcgcgacgctgttctcgtgggtgggctccatgcgcatgagcgtgtacggccgtctgggcgccggcttccagttcggcaaggtctgggccatgatccgccacgatttcagcggcctgctgcgcatcctcggcatggccatcgtgctggccgtcgtcatcggcatcgtcgtgtccatcctcatattcgtcctcgtgctcatcgggctgttcatcggcttcgcgatgacgggcggcaacctgaacatccagtcgtcgcatcccggcgccgccgtctgggccatcgtgttcgccacgggcggcatcatcctcgtgttcgcggtgctgtgcggcatcctgagcacgggcatgtacgtgttcgtcgagatgatgatcgtgcgcgcgctgggctattggacgcgccagttcgacgtgcccgcatggcgcggccaggacgaccccatgcccttcgagcttgccggcgcggcgggctatccgcccgtgcagcagccgccgcacgtgccgcccaccgggcagccgcccgcgcagggctagcctttcgttgttgtgcgattttgaaccaccggggcattgtgcctcggtggttctttgcgtatagggtagactcgaagcgcaaacaagatgggaggatgggccatggaaacggcgtttctgccggtgacgcgcgaggagatgctggagcgcggctgggatcgggtcgattttgcgttcgtgtcgggagacgcgtacgtcgaccatccctcgttcggcatggccatcatcacccggctgctggaggcgaacggctacaaggtgggcgtcatcgcccagcccgattggaacgacccccaaagcatcgccgtgttcggcgagccgcggctggggttcttcgtgtcgagcggcaacatggactcgatggtgaaccattacacggtggcgaagaagcgccgccgcagcgatgcgtactctccgggcggcgaggcgggcaagcgcccgaaccacgcggccgtggtgtacggcaacctgatcaggcgcacgtacaagaagacccctctcatcctcggcggcatcgaggccagcttgcggcggctcgcgcactacgactactggtcggacaagctcaagcgctccatcctgctggactccggcgccgacctcgtgtcgtacggcatgggcgagcactccgtcatcgagatcgccgacgcgctgaacgcgggcctcgccatcgaggacctcacgttcatcgacggcacggtgttccgcgcctcctcgctcgagcatgtgtacgacgccgagacgctgccgtcgtttcccgccctgcaggccgacaagctggactacgcgcgcagcttcgccgtgcagtaccgaaacagcgacccgttcaccggcaagcgcctcgtggaaccctattccgaccacgagttcgtcgtgcagaacccgccggccgcgccgctcacggaaagcgagatggacgccgtgtaccggctgccgtacgcgcgcacgtaccacccgatgtacgagcaggccgggggcgtgccggccatcagcgaggtgaagttcagcctgaccagcaaccgcggctgcttcggcgagtgctcgttctgcgcgctcacgttccaccaggggcgcatcgtgcaggtgcgcagccacgactcgctcgtggaggaggctcaggccatcatcgaggagccggacttcaagggctacatccacgatgtgggcggcccgacggcgaacttccgcgccccggcgtgcgccaagcagctgaaagcgggcgcgtgtccgaacaaacgctgcctgtatcccgagccctgcaagcagctgaacgccgaccacggcgactacctgggcctgctgcgccgcctgcgcaagctgccgggcgtgaagaaggtgttcgtgcgctcgggcatccggttcgacttcgcgctggccgacgaggagcacggcgacgcgttcctccgcgagctgtgcgcctaccacgtgagcggccagctgcgggtggcgcccgagcacgtgtcggacgcggtgctgtcggtgatgggcaagccgcgcaacctcgtgtaccagcgcttctccgagcgcttcacgcgcgtcaacgagcagctggacaagaagcagtacctcgtgccgtacctcatgtcgtcgcatcccggctccacgctcgacgaggccatcgagctggcggagtactgccgcgacctcggctacatgcccgagcaggtgcaggacttctatcccacgccctccacgatgtccacggccatgtacttcaccggcgtggacccgcgcaccatgcagccggtgtacgtgccgaagagcccgcacgagaaggcgctgcagcgcgcgctcatccagtaccgcgatccgaagaaccgcgagctcgtgctggaggcgctgcgccgcgccggacgcatggacctggtggggttcgggccgacgtgcctgctgcgaccccaggggcagggcggcggcagggacaagggcaagggcgaggctggcgcgaagccccgggccggtgcgaagccgaaaaccggtgcgaagccccaagctggtgcgaagccccggccctcgtccccgacgaagccccagggcgggcgctcgggcgctggcgcttccgacggccgtcgcggaaaaagtaaggcgccccgtcggcattgatgctgcacggcgccccatgttgtggcaaaatactactggtcagcccgggtgctcctgggtcgggcggccggtaggcgaaggctcgacagacaaggggtaccacgtgagcgagggcaaagcgacgccgacgatgggggctcaagacagtcccgaggcaatctacgacgcacggaagctcggcaagccgaagatggcggtgttcgggctgcagcacatgttcgccatgttcggcgccaccatcctggtgccgacgctgaccggcctgtccgtttccgcgacgctgctgttcgcgggcgtgggcacgctgctgttccacttcatctcgaagggcaaggtgcccgcgttcctcggctcgtcgttcgcgttcatcgcgggctacgcggccatcgcgccgaacggcgaggccgacctgctgccgtacgcctgcctgggcgtggcgtgcgcgggtctgctgtacctcgtgctgtcggcgctgttcaaggtgttcgggcccacgcgcgtcatgcgcttcttcccgcccgtggtcaccggccccatcgtgatctccatcggcctcatcctggccagctcggccatcacgaacgcgtcgacgaactggcccatcgcgctcgtggccatcgccatcatcgtcatcgcgaacatctggggcaagggcatgatcaagatcatccccatcctgttgggcgtggtggggtcgtacgtcgtggcgtccgccgcgggcgtcgtggacttcacgggcgttgctgaggcggcgtggatcggcatgccgttcacctggaacgatacggtgttctccatcttcggtgcgcagttcgacgcgggtctggccatcacggccatcatcaccatcatgccgctggcgttcgccacgatgatcgagcacatcggcgacgtgtcggccatcagctccacctgcaaccgcaactacatcgccgagcccggcctgcatcgcacgctgctgggcgatggcctggccaccatcctcgcgtcgctgttcggcgcgccggcgaacacgacgtacggcgagaacacgggcgtgctggcgctgacgaaggtgttcgacccgcgcgtcatccgcctggcggcgctgttcgccatcgcgttctcgttctgcccgaagttcgctgccgtcatcgcggccatgccggcctgcgtcatcggcggcgtgtcgctcgtgctgtacggcatgatctcggcggtgggcatccgcaacctcgtggagaaccacgtcgacttcatgaagagccgcaacgtgctgatcacggcgctcatcctcgtgctgtcgctgggcatcgcgtacagcacggccggcgccatcgtggtgccggtgggcgagatcaccatctcgctgtcgggcctggccgtgggatcgatcgtgggcatcgtgttgaacatgatcctccccgggcacgaggacgtggccggcgcgagcgacgcggaagacgaggagatggacggcccgctgccgttggaaggtaatctcgaagagttgagcacgcagaacggctgacgaaaggagcacgcaatgatcgaccatgtgagcatcaaggtgaaggacgtcgagcaggccaaggcgttctacgaggccgcgcttgccccgctggggtacgtgaagggcatcgaataccccggcggcatgcagctgctggtggagggcgagcccggcgacgtgtgggtggccccgctgcccgagggcgccgaggccgtcccgacgcacctcgcgctgcgcgcggccgatgccgccgcggtggccgcgttctacgaggcggcgctggccgccggcggcacggacaacggcgcacccggcccgcgcgactaccatccgggttactacgccgcgttcgtgtacgatcccgagggcaacaacatcgaggccgtcatccacgactggtccgagtaggcgctcgcacgcgcgcggctgcgccgcacgccgcacgtcgcgccggctccgccgtgttcgacggcgccggtgcgaccgggggcccgcgtccgcaaggacgcgggcccttgtcgtagggggagggccccttcccggcgattgtgaagaaattgtatgcctaggttaacttatattgcgcacgatgagttgttagcctaatataactttcatcgaaagcgaagcgatcgaaggaactgaaactcgggtggcgatgccacagcggttcgattctcgcgaagccttcgaaacagtctgctgacccggcggcggaagctcctctcgtctggctatccgtcgcgcttgcaagcggagggaacccccctttccctccgcttttccttttgtcccgcacccctcatacgaacgaatgtttcacgtgaaacattcggctgcgcctgcgcacgacgcgggcgtctcgcgttgcgccgcggccggcgcgcgcccgcgttcgccatgggcaactttcccgtgcttcgcgcggggtttcgcggtaccatgggtgcggacaaaagacgagcaagccggcaggacgagggggtcgtcccgccgacgcgaggagacacgcgttgacaactctgaacgatcttcctatcgggaaaaccgcaaccgtggccgcggtgggcggcgaggggtcgcttcgacagcattttctggacatgggcatcatcccgctggtcgacgtgaccatggtgaagcatgcgcccatgggcgacccgatcgaggtgcgcatccacagctacgagctgacgttgcggcgcgacgacgcgcgcaacatcgagatcgacgacgtgcgcgacggcgccgacgtgcgggagagccgcgcgtcgggcaagcccgtcccgcatccgggcctgggcgagggcggcaagttccacgaccgggcgggcgagaacccgctgccggagggcacgccgctcaccttcgcgctcgtgggcaaccagaactgcggcaagaccacgctgttcaaccagctgaccggctcgaaccagcacgtgggcaactttcccggcgtgacggtggatcgcaaggacggctgcatcaagggccatcccgaggcgctcgtcaccgacctgccgggcatctactccatgtcgccgtactcgagcgaggaggtggtcacgcgccgtttcctgctggacgagcgcccgcgcggcatcgtcaacatcgtggacgccacgaacgtcgagcgcaacctgtacctgacgatgcagctcatggagctgggcatgcccatggtgctggccctcaacatgatggacgaggtggagggcaacggcggcaccatccacgtgaacgagatggagaagctgctgggcatccccgtcatccccatctcggcgtccaagaacgagggcacggccgagctggtggaccacgccctgcatgtggcgcggttccaggagccgcccgtgcgccaggacttctgcgcgcccgacgagcacgacggggccgtccatcgctgcctgcacagcatcatggcgctcatcgaggaccatgccgagcgcgcgggcatcccgccgcggttcgccgcgagcaagctggccgaaggcgaccagctggtgctcgatcggctcgacctcgaccagaacgagaaggacgcgctcgagcacatcatctgccagatggaggccgaacgcggcctcgaccgcgcggcggccatcgccgacatgcggttcagcttcatcggccgcgtgtgcgagcaaacggtggtgaagccgaccgagagtcgcgagcacgcgcgcagcacgcgcatcgacaagctgctgaccggccccttcacggccatccccgcgttcgtcgccatcatggcgctcgtgttctggctcacgttcaacgtggtgggggcgtggctgtccgagctgctcgacggcgggatcacggcgctcaccgacgtggtggcgtcggggcttgcggcggcgcacgtgaacgaggtgctgcaatcgctcatcatcgacggcgtgttcaacggtgtgggcagcgtgctgagcttcctgcctaccatcgtcacgctgttcttcttcctgtcgctgctggaggattccggctacatggcgcgcgtggcgttcgtcatggacaagctgctgcggcgcatcgggctgtcggggcgcagcatcgtgcccatgctcgtgggcttcggctgcacggtgccggcggtcatggccagccgcacgctgccgtccgagcgcgaccgcaagatgaccatcctgctgacgccgttcatgagctgctcggccaagctgcccatctacgcgttcttcacggcggcgttcttcccggcgaacggggcggcggtgatggtgggcctgtacttcggcggcatcgcggtgggcgtgctcgtggcgctgctcatgcgctcgtcgatgttctcgggcgaggcggtgccgttcgtcatggagctgccgaactaccgcatgcccagcgcgcgcaacgtggcgcagatgctgtgggagaaggcgaaggacttcctcgagcgcgcgttcaccatcatcttcctggccacgatcgtcatctggttcttgcagacgttcgacttcgggctgaacgtggtggcggactcgcaggacagcatgctggccgtggtggccggctggatcgcgccggtgttcgcgccgctcggcttcgacgactggcgcatctcgacggcgctcgtcacgggcgtcatggcgaaggagagcgtcgtgtccacgctgtcggtgctgttcggcagcacggccacgctcgtggcggccatcacgccgctcgcggcgctcggcctgctggtgttctgcctgctgtacacgccctgcatcgcggccatcgcgtcggtgaagcgcgagctgggcggccgatgggcgctcgggatggcgttcgggcagctgggcgtggcgtgggttgcggcgttcgcggtgcgcggcgtgggattgtcgctggaggagggcccggcgggggtgctgacgctcgcgttgggcgcggccgtcgccgtgctggcggtgctcgcggcgcggcgcctggcgcgcaagcggcgcgcgccgggcgccgtgctgggctgcggcgcgtcatgcgacggttgcgacggctgcacgcaagcgggcgcggtcgaggtcgaggaggaggccgacgcgcgggcgcggtaggccgggtcggctccaccgggggcgccggtggagcctttcgcgcgcggcgcggcggcgggggcctagggtcgcgggcttgcctcgggcttgatcttccagccgttggcccgttgctgctccgcccagagggcggcgtacagggggctgcgtgcgagcagctcgtcgtgggttccctggctttccacgcggccgctgtcgagcaccacgatgttgtcggcatcgcgcacggattgcaggcggtgcgcgatggccatcacggtcttgcgcttcaccagctcggcgatcgcctgctggacggccacctcgttggcgggatcgagcgagctggtggcctcgtccaggagcacgaccggcgcgtccttcagcagcgcgcgggcgatggagatgcgctgtttctcgccgcccgacagcgtgcagccgccttcgcccaccacggtgtcgaagccgtcgggcagcgcctcgatgaaatcgaggcaggcggccaggcgcgccgcctcgcgcacgtcctcgtcggtggcgtcggcgcggcccatgcggatgttctcggccacggtgtcgtggaacaggtacacgtcctggaacaccacgctcgtgccggccagcacgtcgtcggcggccctgcgcgcgaggtccgccccgccgagcgtcaccgtccccgcctgcgggtcccaaaagcgcgcggccagcttcgccaccgtcgacttgcccgaacccgagggtcccacgagcgccgtgaggcctccctcggggatggtcaggctcacgtgttccagcgcgcgttcgtcgccgccgtaggagaagctcacgtcgtcgaacgcgatgccgtgcccgtgtggcgcggccggcgcctccgcgggcggctcgggaagctcgggctcggcgagcaggcgctcgatgcgctttcccgcggcgtccgcgttgccgaaatcggacaggaagtagaacagggtcacgatgggctcgtagatgccgagcgccaagagcaggaacatgagcagcacgaacggatgcaccgcctgcgcttggagcagcgcgcatccggccagcatgaccacgccggcgccggcgagcagcagcgcgcggccgaacacgcccaccggtcggctggcctcctccttgccgagcgatgccttcctcagctcttcgaagctggcgcgcagcgagtcgaagcgggtgcctgcgaggttgaacgctttgagcgtgcggatgcctgccacgtactcgatggtgcgcgacgagcattcctgggaggctttcgtcaagcgcccgctgctctgcgccatcgcgttgaaccccttccagaggaagggcagcgcgcagggcaccaccgcgaaggtggccagggccaggcgccagtcgaagaaggccagcaccacggccgacagcgtggtcttcgccgcgatcatgcccgcttgcgacagcacctcggcgccgtagttctccaccgtctcgtaatcgcgcagcagcacgctgtcgatgtcccccgcgtcgtggcgctggtagaacccgagcggcagccggcgcagcttctcgcccatggccagccgcgcgtcgagcacggcgtcggccgtgccggcgcacgacagcacgtagaccttgtgcgacgtggcgtaggaggccagcacctgcgccgccagcaccgcgacgcaggcccacagcgcgacgaagtcgagcgcggcgcccggatggacgatcggctgcacgagcagccaggtggccaccaccatgaccacggacggcacggacgtcacgagcgagtcgaggaagcgccacagcacgaagcgcacgcagcgtcgcgggttgccgaaggtgagccggtcgatgctttctttcaggcgtcccatgtcatccttcctttccgacggtgagcgtccacgcgtccttgcgctcgtccgcgtccaccatcgagcggtagagcgggcaggcgtccatgaggtcgtcgtgcgtgcccgtgccgaccacgcgcccctcgtccacgacgacgatgaggtcggcggtgcgcacggttttcatgcggtgggcgatgactagcacggttttcctggcggccaactgggcgaacgcatcttgtatcttcgcctcgttctcggcgtcggcgtaggccgtggcctcgtcgaggatgatgaggggcgtgtcgcgcagcatggcgcgggcgatggcgaggcgctgggcctcgcctcctgagagccgcgtgccgtctgcgccgacgacggttcggtatccctggggcagcgcgtcgatcacgtcggcgatgctggcggcttcggcggcggcgaccacgcgctcgtgcggcgcggacgagcccatgaggatgttgttctccacggtgtcgtcgaggacgaacgaatcctggaacaccgaggaggccagctcggtcaggcgctcgggcgcgatgtcccgcaggtcgacgccgccgagcgcgatgcggccctcctgcgggtcgaagaagcgcaggccgagcgccgcgagggtggacttcccgccgcccgacgggcccacgaggcccacgacggagcccgcgggaacgcggaaggtgacgtcttccacggcgttcttcttcccgtcgtaggagaacgtgacgtgttcgaacgccagatcgaacgccgtgggctcgaccgggtgctcgggttgcgagagctcgggctcggccagcacctcgtcgatgcgcgcgacggaggcgttgatgccgttcacgccgagggcctgcgtgatcatctgcatgaccggctccttcatgccgcctcccaccaggaagaacagcaacgccgtcgaaaggaagtcggcgtaggacgccgccgtgggcaggatgatgagcacggcgggcagcagcaggagcatctgcgtccccgcggcggcgtacagcttgcccatgccgcgggcgttgaaccaggtggcccacttgatgttgcccacgaactcgcgtgcgtccgcctcgaagcgcccgaatgcggccaagctgcggttgaacaccttgaccaccggcatgccgtgcacgaactcgaccgtggtgccgttgagcttctcccggctttgcgccatggcccgctggcatgccgcgccctcggggcttcccagcgcgctgcccagcaggaggaacgaaacgacgatgggaaccaccagcagcaacgccagccgccaatcgacgaacgcgagggcggcgatggtcagcagcggcagggcgacggcgcacaccgtgtcggagaggttgtgggcgatgaacccctcgatcttctccacgtcgtcgttgagcaccttcttgatctccccttggcgcacctggttgaaatagcctgacgggatgcgggcgagcttgtccatgagctgcaggcgcacttcgtacagcacgtcgaaggcggcccggtgggcgagcatcatggagaggtagcccgttgcgccgtgcaggacggccgcgcccaccgtggcaaacgcgaggccccagaggaagggcaggtcgagcgcgcccaggtcgttccagttcaggatgatggcgcgcaccatgaggtagatggtgaagtacggcgcgagccgcgccgccgccgagagcacggccagcgcgcaggcgcctgcgagcgggcgcgcccggctgcccgcaagctccatgagccgtgcgaggccctgcttggggcgggcgttcttggccgggggctcggcggcaggccgggcaccgggtgcggctgggcccgcggcgggggcggcaggggaggggacggccgcaggggcctgcgacccctcgggcgctgcggcgggcggcggtgcgccctcgtctgcggcgcccgtgcttgcccgcgcgccccctcccgccgccagcgattcgtagaactcccgttgggcgcttgagaacacggttctgagcgctggtttgcacgcgggcgtcgccatgggccttcctcctgcttccgcttgtccgctccgataaaatgaccggaattgagaattcggtcatttagatgttagcgtaggataactattccggcaagaagaaaatgaccaaattatcaacagcggtcattttgtgtgcggttcgcgtatgcggttcgcggtagaatgacggggaggatccaagcgcgcccgggcgtcgcagggcgcgcctgcgcgaaaggaggggccatgcccgcgatattcaccgaggccgaccgcgaggagctccgccgccgcatgttcgacgccgggtgggacctcatcgtcgagaagggcgtccgcagcttgcgcgtggaggacgtggcgagccgggtcggcatcgccaaaggcacgttctacagcttcttcccctcgaaggaggagttcgcgtactccatcgtgaaggcgaatcgccgcgcggtcatggacctgttcgaggagctgtgcgagcaggagggcggccgcctgggccgcgacgccatgcgcacgtggctgcgatcgctgtggtacagcgatcgcaacatctaccgctacgccaccgccgaggacttcgcctacctctcccggcgttggcccgacgagcacagcttcgatcccgaggtcgatcgcgtcacgatgggccggatcatggagcgcctcgagggcgtgcgtcccgatgcggactggcgcgtggtggcgaacctccagaagggcatcgcgctcatgctgctcgaccggagcctcatgcacgcggaggccctcgacgccgccgtcgacgccgtcatcgaagccatctgcgacgagctgttcggccggaagggctaagccgcccgccgcagccctgcatggtgcggcgggcgtccgaacgtcagccgcgggcgcgccaggccgagggggtcgcgccgaagcgctcgacgaaggcggcggcgaacttgctggggttgcggtagcccacgcgcgccgcgacgctggcgacgctctcgcggctccccgcaagcagacgcgcgccttcctcgacgcggcattggcggcggtacgccatgggcgacagcccataggcgtgcaggaagcgctgcttgaacgtggagaggcccatgttcgcgcagcgcgccgcatcttcgagcgcgaggtcttcgtccaggttgctgccgagcaggtcgagcgcgcgttcgagggcgagcgcatgatcgtgggtgcaatagggaaacgtcttccacacggggcgctcggtggcgtcgagcagcgcgaccagctcgagggccttcaggcgcatgcgctcgatgcgcgcccgatcgtcgatgcggtagaacgaggccagcagggatgccagagtgtcgtcgggcaggaagatgcggcatccgtccccgccagcatagcgctcgcgcagcgcgttgaagtcgacgccgcccgtcgcgtcgtgcgccctgagcgtggagctgccggtctcgtactcgatgctgagcgtcagccccacgtaacggggcatggggtagcgcatttgccgcttgatgatgcgctggtcgtgcaccgcgcattctctttcgtggatgaagtagcttttgccgttggcgctggctatctcgccgcggccctgctggcaccattcgatatgaagcgaacgaggctcgctgctcttccaggtcagcgagccatgcgggatgtcgttgaacgtgaggttcacgccctcgaacagctcccagtcctctacgatgccggacgctccgttgtccagcgcgagccggaacacggtgcgcgggccgtccttctcgacgatatcgaagcggccggcgttgcgcgtggccaggtactcaaggcttttcatccaaagctccttcgtgcatgaagaacccgctcagccgacgcgttcccgccgcgtcgagcggataggattccatgatacccccgtcctcgaggcgcaccacccacgaacagcaggccatgatgaactcgggatcgtgggtgatcacgagctgcgccgccccgcgacgccgcacgtcgtggatcagccgggcgacctgcctcatgcggtggaggtcgagcccgctcgtgggctcgtcgtatacgatcacctcgcgttcgctggccagggcggacgcgatgcacgtccgctgcttctgccctcccgacagcgagagcgggtggtcggccgcgcgctcgtcgaggtcgagcgcggccaacaggcgatgcgctgcttcctcgtcgggcttcgccatgctcagcagcacctcgtccagcacgctctcggcgaatagctgatggtttgcgtcctgcatcacctggaagcagctgcctgcgcgcgtacggcgcgagcgggcgcgtccgtcgacggtgagggttcccttgcagcggttgaggccgcacagcgcgttggcgaacgtggacttgccggcgccgttcgcgccgatcacggccacgacggcgcgtcgcggcagctgcgcgtgcgggatgtcgagcgcgcagcgcgagcgcgcgccgcggcggtaggagaaagagaagccgtcgagcgcgaacgttccggcaggctctgcgggctcggccgctgccgggggctgcacgaacgccgcggagagccgcagcgttcgcagcccgagctcttccagctcccggtcgtcgagcgagcgcagctcggttccgctccactggcgctcgaccgccccgtcgcgcaggtagtaggcccggtcgacgaggtcggtcaggtagtgcagccggtgctccgccaccagcaccgcgcagccctcgcgcttccagcgctcgacggcggcgcgcaggtgcgccatcgaggggaaatccaggttcgaagacggctcgtccagcaccaccagccgtggcccggcggcggtggcgctggcgcaggcgatgcgctgcttctgcccgccggacaggtcgaaaaggctccgccccatgagcggctccagctcgaacgccgtggatgcggtgtcgatgcgccgttcgatctcggcgcgctccatgccctggttctcgcagccgaaggccagctcgccgcgcacgtcgacgttgaagaactgggacttcgggttctggaacaccgagcctacgaggcgtgccgtgtcgtgcagcggtgcgtcggccgcgtccagcccgcccacgcgcactcgtccttccacgcggccctcgtagtagtggggcgcgaggccgttggccaggcgggtgagcgtggtcttgccgcagcccgacgggccgcacagcagcaccacctcgccggacgccgcttgcaggtcgacgcggcgcacgccggcaccctcccgcccgttcgcgtaggagaacgaaacgtcttccatgacgagtgtgggctcgctggtcgagcccgcgcttcggtttccctcgacgtccatctcaagcccctatccaaccgaggctgctcgccacgagcagccctaccgacacggcgcacgccgcccgcacgacgacgtccgccgcgccgaagccgatgtcgcagatgttcgtccgcctgacgggcgcgcccagcccgcgcgtcagcgacgcggccgacaggtcctcgcctatctgcacggcgcacgagatgagcggcaccaggcggtactccacgagcgataccggaccagccttgcccagcctcaggttgcgcatgcgcatggcggagcccacggcgcgcgcctcctcgccgagggtggggaagaagcggaacagcaccgacagcgggatgaccagccattgcggcgcatgtacgcgctcggctgcggccatgaactccgacaccgtggtggtggcgaacacgaagtacgccgtggcgatggtgggcagaaagcgcgaggcgatcatgcacgaggccacgatagcgaagttcaagggcccttcgaccaggggcaccgcgagcgcggtgaggctccacgatgccgcgtaggcgaccaacagccccgccgccgcgccgatgcggcccgacacggccagcagcgcgaagggagccagcagcatgagcacgcgcgccgcgtccatgaccggaccgctcccgcctaccaacagcgcggtcgacactgaaacgagcagcacgagcttggtgcgaggatccaggcgcacggtgcgctccacggccccggtctgcagcagttccacggccatgccctacgcgatgcccgcacgcttgaagtgcttccccagcaccttgaggccgatgaacccgccgacgatgccggtgacgaagcacgcgatcaacatggccgggtacgcccacggctgcaggtagcccatgagctcgttgacgtaggcgtcgccgaattgcccgcgcatggtggcgtagtagctgtcggccgtgagcagcatgggcaggaagttgccgatcatccagcagctgaacacgccgtgcgacaacacgctcatcttcgcgttggcgtagcccccagcgcgcacgatgaggtcggcgatcaggccgcataccaatccggtgacgatgctgaagtagcccatgcccgtgacgaacatgatgatgcccacgagcagccccatgatggtgatcatgccgaacttcttcacgcgggtgaggtacagcatgtaggggatgcccgctacgagtgggatgatgccgcagatgagcaccataaagatgggaatgaagcccaggcacgccaccgcgaacacgatgacgaagtagatggcggtgaatatgccgatgttgatgaagtccttgccgttcagccttccgcctgcggaggcgggcgaggagcccagcgcggctccggacgaggtcgtcttcatggttggtccagcctttcttgccgaagcgcgcaggtgcgtgcccggccgatgtcgagggtcgatggagatggggatacgggacgtgcggacgtgcgcttgcacggacccggcgtccggttcgccggctcacgatctccggagtaaaagttaacctaagcgaaccattggcatgatacggcattgcataggggttgtgcagctccgaaaagccgtcgcaagcccgagcagccgaccgttcggagcaggagggggcgagagggggtcgaggagggagtgcgcggcgaggtcgggtcgcgaggaggcgggatgcggaggattcgcgttaccttgaggagctcactcctttaaagttagcattggctaacaatgtggtatcatgggcgtcgtcatcgaagatggaaggcggtacctatggttgtcggcgtgcacaagtcgcttgaagagggtcggacgtattcctacgccgagctgcgcgaccggttcggcctcgcaggcccggacctggagcgagtgctcgatcgtctcgtggagcgcgggcggctgaagccggtgctcttccgccgcgtgcagcaggcggggcgcgcgtcgctcgtctgcgccacgcgcgagagccatctgcgctgggaggcgtgagcgcgctcgtgccgataggccgcgcttccggcatcgccgtcgcgccgcgcagccgctttggggtatcatggctgcagcgacggacgagaccaggcgggggaccatgcgcaaccacaagacgcctgcaggcgaaacggcgggaagcgagcggcgcgatgcgcgcggccggctcatgtcgtgcgccgtcgcggagttcatggagaaggggttcgccggagcttcgctgcgctcgatagccgcggctgccgatatgaccacgggcgccatctacgggtacttctccggcaaggaggccctgttcgacgccgtcgtggccccggccgccgacgagctgtacgcccgctacgagggcgcccaggaccggttctacgagcagcctctcgaggcccagacgttcgagcggatgagggtctacgaagagcgcatgatgcacgatctgctcgacttcgtctacgacaaccgcgacgcgttcgtcctcgtgttcgcgagatcggccggcaccgcgtgggagcgctacctcgaccgcttcatcgagcttgaagtgcggagcaccgcccgctacgtgcgcgagatgcgcgagcacggtatcggggtcgtcgagcccacgcccgagatgtcgcgcatcctggccggcatgttcttccgcggctacttcgagccgctgctgctgggcctgtcgcgcgaggcggcccacgcgttcgtcgccgatttcgagcgcttcttccacgccggctacgagacgatcatgagcccccagccgtcgtgatcctcgggtcgccccgatgtttcacgtgaaacatctgttcccttcacgacggcggatgcgcgctcgcgcaacgggacgcgcgtgcgcaacgggacgtgctcgcgcaacggcgcgcgcgctcgttcgcccttccttccgctgtgatcctcgccgaatcgctacatcgcgcgcccgtccgtccctgcacggtccatatcggggcgaaaaagttgtaacaatgttatataacggtgttatacttccgaatgtaagcctgaggtaactttcggaaaggaatgcgtatggatgcgggaaacgcggttgttgcggacgatgcctgcgtcggcgcgcccgagcggggcccggcgtccgcggagaagcgggagccgaacccggtggcgctgctgctggcgtggtcggaggagaacaggggccgctacgcgctgtcggtgctgctggccgtgatcggcgtggcgggcagcatcgtgccgtacgtggcggcggggcagatgatcgtgggcgtgctgggcggggtgcgcgacttcggcttctacctcatgtggtgcggcgtggcggcggcgggctacgccggctacatcgtgtgccaccacgcctcgaccgccgtgtcgcacaaggccaccttctccaccatcagcaaggtgcgccggcgcatcgccgacaagctcacgcgcgtgccactgggctacgtgctggacacgccttcgggcaagctcaagaacatcatggtggagaaggtggacagcatcgagacgacgctggcgcacgtggtgcccgagatgacgtcgaacctgctggtgcccgttgccgtggtggcgttcatgttcgcgctcgactggcgcatggcgctcgtggcgctcgtcacgctgcccatcgggttcgtggcctacatgggcatgatgaaggactacgaccggtggtacgcgaaaacggtgcaggccggcgaggacatgagcaccacggcggtcgagtacgtgaacggcatcgaggtgatcaaggcgttcggccggtcggccagctcctacgagaagttctcggagacggtgggccgctacgcgcgctcgttcatcgactggatgcaccacgtgcagatcttccaggacctgggcctggccatctggccggccacgctggtgacggtgctgccggtgggatgcctgttcatcctgcagggcacgctcgagccggccacgctcgtgatggtcgccgtgctgtcgctgtccatcttcccgccgctgtacgcggccatgagcttcatcgactcgctcgcgcagatcggcacggtggtggagcagatcaccgccatcctcgacgagccggagcagcgccgcgcctcggcgtcggtcggcgccgaggccctggcgcagccgcgcggcacgcgcatcgagctcgagggcgtgcgcttctcctacgggcgcgaggaggtcgtccacggcgtggacctggccatcgagccggggcaggtgacggcgctcgtcgggccgtccgggtcgggcaagtcgacgctcgcgcgcctgatcgccgggttctgggacgcggacgccggcacggtgcgccttggcggcgtgccggtgggcgagctctcggccgagcagcttgcgggctgcatctcgtacgtcgagcaggacaactacctgttcgacgacacggtgatggagaacatccgcatgggcaggccgggcgcttccgacgaggaggtggtggccgtggcgaaggcgagcggctgccacgagttcatcgaggcgctcgagcacggctaccggacggtggtgggcggcgcgggcggccacctctcgggcggcgagcgccagcgcatcgccatcgcgcgcgccatgctcaaggacgcgcccgtggtcatgctcgacgaggccacggcgtacaccgaccccgagaacgaggcgatcatcgagcaggccgtgggcaagctggtggcgggcaagacgctcgtcgtcatcgcgcaccgcctgtccaccatcgtcgatgccgacaagatcgtcgtcgtgcgcgacgggcgcatcgaggcccagggcacgcacgacgagctcatggccggttgcccgctgtacgcgggcatgtaccgcgcccacatcgacgccaaagacgcggcataggaggctcgcatgctcgataccatcaagaagtacttcgcgttcggaggcagcttcgccggacacctcaagcgcggcatggcgtggtcggtgctgaactcgttcttcgaggcgtggcagatgatggcgttcgccgtcgtgctgttcgcgctggcggacgggacgctttccgaggccacgatgtggacggcactcgccatcatgctgggcagcatcgcgggctgcttcgtcacctcgcacttcaagagcgagaacttctgcaaggggaacttctccatgacgggcgagaagcgcctgcagatcggcgaccggatgcgctaccttcccatgggctacttcaacgagaacagcctgggcgccatctcgggcacgatgaccaacacgctggacgacgtgcagaacgccgggggccaggtgtactcgaacgtcatctcggggttcgtgttctcggggctcatggcgctcatgctgctggtcttcgattggcggctcggcgccgtggtgatcgcgaccatcgcgctgttcctgctgatcaacagcgcgatgcagcggagcgcgcacgcgttgtcgggccagcgcatggccgcgcagagcgccatcgtgggcgcggtgctggaatacgtgcagggcatgggcgtggtgcgcgcgttctcgatgacgggcgacgccgagcggaagctgtcgggcgccatcgccgaatgcgagcgcatgaacgtgtcgttcgagttcaagttcatccgcttcgccgtgctgcaaaccgtgctgaccaagacgtcgagcgtgctcatgtgcctcgtgtgcgtgtggtgctggatcgcgggcacgatggacgcgggcgtgtgcctcgtggccatcgtggcgtcgttcatggtgtacgggaagctggagatgtccggcacgttcgccagcctgctgcgccagatcgacatctgcatggacaaggtgaacgccatgatcgccacgccggccatggacgagggggccggggtcgagcgggccgacggcctcgacatcgagctgcgcgacgtgtcgttcggctacgagaaccgcacggtgatcgaccgcgtgtcgctggccatccccgcgcgcaccacgtgcgccatcgtggggccgagcggctcggggaagaccacgctgacgcagctcatcgcacggttctgggacgtcgccgccgggcgcatcacgctggggggcgtcgacgtgcgcgactggaaggtggacgagctgctgggcaacttctccatggtgttccagggcgtgtacctcttcgaggacaccatcgagaacaacatcaagttcggccggcccgacgccacgcacgaagaggtggtggaggccgcgcgccgcgcgtgctgccacgagttcgtggaggggctgcccgagggctacgccacgcgtctgggggagggcggcgccacgctgtcgggcggcgagcgccagcgcctctccatcgcgcgcgccatcctgaaggacgcgcccatcgtcatcctcgacgaggccaccgccaacgtcgacccggagaacgagcgcgacctgcagcgcgccatcgccgagctgacgcgcagcaagacggtcatcatgatcgcgcatcgcctgaagaccgtgcgcgatgccgaccagatcgtcgtgctcgacggcgggcgcatcgtgcagcgcggcacgcacgatgcgctcatggccgaaggaggtctctacgccgatttcgtgggcatgcgcgagcgtgcgatcggctggaagctgggcggggctgcgacctgcgctaacgctcctgcctgagcagctgcgggagctcggccagggtgcgcaccacggcgtcggccccggctgcgcggaagcgggcctccacccggtcgcgcgcccggtcgcgctcggccgggctcagggcctcgtactcctcctgcgcaagccccagctcggagctgccctcgatcacgccgatggtgaacacgcccgccgccttgccctcgcgcatgtccgaggcggtgtcgcccaccttggcggccgcctgcaccgagctcacgccgagggcctccaggttgcggaacaccatgtagggccacgggcggcccttgccgtgcgtggcgtcgggggtgatggagaagtcgggcgcgtagccgcgctcgcgggcggcgggcgccacgatggccatcatcttgtcggtgtagccggtggtggcgccgatgcgcacgcccgcggcgcgcagctcggccaccgtgtccagcacgtggggcttcggctcggcgaagcgggggaggatggacagcagcttgccctcgaacagggcgtacagggcctgcgcgtcgtcctcgtcgggccgcttgccgtgcacgcgctcccatgcggaggcgatgcgctccatgcgcagcatctccctgatgtggtcgattttcagcatgcccatgggcgcgcgcgtttcctccatcgtgggcttcacgccgtggtgctcgaacacgtcggcgaacgcctgcacgggcgcgaagcacccgtaatcgaccgtcgtgcccgcccagtcgaagatgaccgcttcaaccatgctacgcctccttgcgcttcgttgcgacgaactcgccgaggatgctcgtcacgttgaggatgtccgccgggtagatctcgccgatggtgccgatgcggaaggtgtcgccgtccgtgagcttccccgggtagatgacgtacccgcgcgccttgacgtagtcgtacatctcgcggaaggtgaacgccgcgtcggccgggtgcgcgaaggtggtgatgatgggcccctggttctcggtgaggtagggctcgaagcccagcgcgcgcatgcgctcgatgagcagccggttgttctcggcgtaccgcgccgcccgcgcgctcacgccgccctcctcctccagctcgcgcagggcctgggcgaaggcgagcaccgcgttggtgggcgaggtgaagcgccacttcccgccgtcgcgctccatggtctgccactgggcgtacaggtcgagcgacaggctgcgcgccttgccgcggctgccttccagcaggtcgcgacggcagatggcgaaggagaagccgggcaccccctggatgcacttgttcgcgctgctcacgatgaagtcgatgccccagtcctccacggggatgtcgatgccgccgaagctggacatggcgtcgacgatgaacgccgcccctgcgcgcttggccacggcgcctgcggcctcgatgtcgttgaccaggcccgacgtcgtttcgttgtgcaccatggccacgtgcgtgatggaggggtcggcggccaggtgcgcggcgatgcgctgcgcgtcgacgggggtgtcgtagggctcggcgtacacggtgacgggcacgcccgcctggcggcagatctcggcgaggcggtcgccgtaggcgccgttcgcgcagacgagcacgcgctcgtcgtcgccgaccacgctcgtcagcacggattcgttgccgaacgtgccgctgccctgcatgagcacggccgtgtagcgctcgggcgcgacgtgggcgaggcgcagcaggtgggcgcggatgtcctgcgtgatgcgtttgtagtcgtcgtcccaggtgcagtggtcgaacagcatctgctccttcaccgagcgcgtggtggtgagcgggccgggcgtcagcagcttgtaggtaagctccaaagcgatctcctccgatggcgaaagcgggttttcttcgcaccgtattctgcgtttggaacgtttggccctcgtcaaccgcgggtaaagatcgcgcaaattcgcaggagaggcgggacggggcgctaggccgcttccgcgtccggctcgaggtcgcgcagggcggttgccgcgccgggcgccgaggcgggtgatgcgtcgccgctcggcgcgaagccgctgcggtgcgatccgccccctcccgacgcgtcgtgcgaagcctccgggaaaataagttagccacagttgacataagaagaggtgctcactataattcgaaccgtcggtttgagaccgttggttttgatggcggcgggtgcgccctgcgaggaggtgcccgaggcggaagctcgaggaggtgcgaaggcgtgaagcggatcgagggcgtgaccgagcggttgctggcggctgcgcgcgaggagttcctggagaagggctacgaagccgcgtcgctgcgcgccatcgccgaacgtgccgggtcgagcaaaggggccatctacgtgcgctacgccgacaaggaggcgctgtatgcggccgtggtcgacccggtgatcgaagagctgtgcctgttcttcaccgaggagttcgacggcttcggcaagctgcccgctgacgtgcagcagtctacgatgaacgactatgccgaccagggcatagggctcatgatggactacatctacgaccacttggccgagttcaagatcctcgtgaccaacggcggcgagcgctacgacgagttcatgcaccgcgtggtggagttgaacagcgcgacgacctaccgctacatcgaagccgtcggcagcgacgccgtgacggcggggcggctgacgcccgagctcatgcacatgatatcgagcgcctgcttctcgggcatcttcgaggccgttgcgcacgacatggggcgcgacgaggcgaaggcctacgtcgagcgcctgtgcctgttcttccgcgcgggctggcaggccatcttcgacccgcagttcgcggcgttggtcgacctggccgcgcagatgcccgatgcgcccgtgcaggacgtggccgctcgcctcgtcgaagcgcgcgggggtgcgccatgaggtgcctcgtcgacgccgaaggctgggttcgctgcccggtgtgcggcgccaagacgaggacgaaggtgcgtgccgacacgcacctggtccggttccccctgtactgcccgaaatgccatcgcgaaacggtggtggatcggcggccggagggggaggcgcgtcgatcggacgcgcgtacaacgacatagaacgacatagaacgacccgcgcagagccagacgcattcgacgcagagccgcaccgcagggacttccggaaggagcctgcggtgcggctcttttcatgcgcccggcctgcttcgaagagaaggagacgtcctcatgacggatagtgcaggcggggtcgcggcagccgatgcggttgccgtgcccgccgagaaggccccgctcccgaacccgcgcgccgcgtccgcggaacctgccgcgacgaagcccttcgcgcgcttgcgatcgctggcagcgccccatcgggggctctacttcaagtccatcctgctggccgtggcgggcgtggcgtgcggcttcctgccctacgtcgccgtggccaacatcgccacagcgctcatagccggaaccaccgacctcgcattctacctgggctggtgcgcgctcgccgcggccgggcaggtggcgaaggcgttcctgtcgggcgcctccaccaccacctcgcaccgtgccacgttcgccgtgctgtcggaagtgcgccgcgcgctggccgccaagctcgaccgcatgccgctgggctacgtgctggaaaccccctcgggcaagctgaaggcgccgttcgtggagcgcgccgaacagctggaggtgccgctggcccacgtggtgcccgagatgacggcgaacctgctggtgccgctgggcatcatcgccgtcatcttcgcgctggattggcgcatggggctggcgtcgctcgtcaccattcccatcggcatgctgtgctatgcggtggagatgcgcgactacgccgagaagtacgggcgcgtggtggccgcgaagaaccacatgggcgccaccatcgtggagtacatcggcggcatcgaggtaatcaaggcgttcggacgcagcgcctcgtcctacgccaagttcaccgatgcggtgaaggcgaactccgggctcatgatggactggtcgcgcaccacgctgccgtggacggccatcatgatgagcgtgtggcccagcgtgctgctgggcgtgctgcccgtgggctgcttcctgttcatggacgggtcgctctcggctgccacgttcatcaccgtgatcgtgctgtcgctgggcatcatcgggcctttgttctcggccatcatgttcaccgacgacatcgccaagatatccaccatcgtgggcgagatcggcacggtgctcgaccagcccgagatgaaccgtccgacgcgcccgtgcccggtgcgaggctcgcgcatcgagcttgacgacgtgacgttctcctacggcgacgtgcccgtgctcaagggcgtgacgctttcgatcgcccccggatccatggtcgcgctcgtggggccgtcgggttcgggcaagtccaccgtcgcgaagctcatcgcctcgcagtgggaggctgcgggcggggccgtgcgcatcggcggctccgatgtgcgcgacatgccgctttcgcaggtggccgacgcgatagcctacgtggcccaggacaactacctgttcgacgacacggtgatggagaacatccgcatggggcgtcccgacgccaccgacgaggaggtgacagcctgcgcgaaggcgagcggctgccacgagttcatcacggctttggagcacggctaccagaccgtggtgggcggtgccggcgggcatctgtcgggcggcgagcgccagcgcatcgccatcgcgcgcgccatgatgaaggacgcgcccatcgtcatcctcgatgaggccacggcgtacaccgaccccgagaacgaggcggtcgtccaggacgccgtggcgcgcttggcgcgcaacaagacgctcgtcgtcatcgcgcaccggctttccaccgtcacgcatgccgacgccatcgccgtgatggacgacgggcgcgtggtggcctgcgacacgcacgagaacttgctggaaacctgtccgctgtacgcgagcatgtgggccgcgcacgagtctgtgagggacgtcgcatgatcaagatattcaagaagttcttccgattctcgggcgagcatcggcgcgcctggtacctgtccgtcgtgctggagttcttgcgctgcatcgccgaggccatccagttctttccgctgttcctcgtgctgctgcacctcgtggacggcacgatgacgcccgctgtggcgtggacggcgctggggttggtggcgctttcggtggcgctgcaggccgtcctgcactacttcagccacaagctggagatgcgcgcgtgctacctcatgctggacgacaagcgcatctccatcggcgagcgcatgaagtacatgcccatgggctacttcaacgaccgcagcctgggcaacctgaccgccatctgcacgtccaccatggaggatctcgagtccatggccggcgccatcgtcgtgcgcatcctggcgggcgtcctgcatgcgctcgtgttctcgctcggcttcatgatcatcgattggaggatcggcctcatcttcctggcgggcgtggttgccatgctgctggtgaactcgcgcatgctggccatgtcgcggaagtactcgcccgagcgtctggcggcccagatgaggctggtggacgcggtgctcgagtacatccagggcatgagcgtaatcaaggcgttcagcttgtcggggcgcgcgggcacgtccatcgaggacaccatcgacgagacggagcgtcagaacttcaagctggagaagaagagcattccctacaccatcgcccagcaggtggtgctgcgcctgttcgcggtggcggccatcgcggcgtccatcgtgttcttcctgggcgggacgatgtcgctgttcgtgtgcctgctgatggtgatcggcggcttcctcgtgtacgggcagctggagggggcgggctccctgtcgttcatgctccccatggtggaggcgtccatcgatcgcgtggaggaagccgattccgcgccgtacatggacgagcgcggcacggtgcgcagcgcgccggggcatgcgatagagttcgcgcacgccagcttctcctacggcgagcgcacggtgatcgacgacgtgtcgctgagcatccccgagcgcaccagctgcgccatcgtggggccgtccgggtcgggcaagaccacgctcgtgaaccttatggcccgcttctgggacgtggacgcgggcacggtgtcgctgggcggcgaggacgtgcgcgactggaagctcgacgagctcatggcgcacttcgccatggtgttccaggacgtctacctgttcaacgacaccattgagaacaacatcaagttcggccgtcccgatgccacgcacgagcaggtggtggccgcggcgcgggccgcgcgctgccacgacttcgtcgaggcgctgccggagggctacgccacgatgctgggcgagggcggggcgacggtgtcgggcggcgagaagcagcgcatctccatcgcgcgagcgctgctgaaggacgcgcccatcgtgctgttggacgaggctacggcgaacgtggacccggagaacgaggacgagctgcaggccgccatcgaggagctgacccggcgcaagaccgtggtgatgatcgcgcaccggttgaagaccgtgcggcatgccgaccagatcctcgtgctcgacggcgggcgcatcgtgcagcgcggcacgcacgacgagctcatggccgaaggcggcatctacgaggacttcgtgcgcatgcgcgagaaagccctcggctggaaggtgggcgcggcctagccagctggcgggacgggccggaaggcgggcggggcgatgggccctgcccttgttggaaccatcggagaaagaaggttttgtatggcgcaggttcaaacgacgaagggcgcacctcggggcgcgaagcgcgagatcgagcagaaagcgggcatcggggtgcgcgacctcgtgacggtggcggtgttctcggtcatctatttcatcatcttcttcgcgtgcgggtgcttggggttcgtgcccgtcatggcgtttctgttcccgctgccgctcgcgctggtgtcgggcatcccgcagatgctgttctacacgaaggtgcgttcgttcggcatggtcaccatcatgggggcgctgctgggcctgctggcgttcctgatgggctacgggcccatcgggctgggcttcggcatcgtgttcgggctgatcgccgacttgatcctgcgcgccggggcgtacaagagcacccggtgcgccgtggccgcgcacgctgcgttcagcctgtgggtggtgggcaccatgctgcccatgtggatcttggggcaggcgtacttcgagccgttccgctcctcgcagggcgacgcgtacgtgaacgagatgctgggcctgctttcgggcggcatgctggctgtggtggtgatcggcatcgtggcctgcgccgtcgtgggcgcgctcgtcggccgcgcggtgctgaagaagcacttcgagcgcgcggggatcgcgtgatgaaggccgtcgcgctcgtcgcttcggagggctctgcgcgcgcatcggaggcgcgcagggccttgcggctcgacccgcgcacgaaggtgctcatgctcgtgtgcgcgaacgtgacgctcctgtgttcggggttcgatgcggccggcttcgtgctcaagttcctcgtggcgggcatcgtggtggccctgctgatcgcggcggggcgtcgcgcggcgggtatcgggttcgcggcggtcttcgcggctgcggccctgctggagcagatgaacgaacgcggcctgctggacgccctcgggtccacgagcgccgccgccgtgacgctgcggttcctgtcggcgctcgtgctgcagctcatgccgggcaccatgttcgcctactacctgttcgccacgacgaaggtgagcgagttcgtggcggcgatggaacgggtgcgcctgccgcagcgcgtgatcatcccgttcgcggtggtgttccggttctttcccacggtgctggaggaataccgctccattcgcgatgccatgcgcctgcgcggcgtgggttggaggagcgggccggtggccctcgtggagtatcggctcgtgccgctggtggcgggcatggtgaagataggggacgagctgtcggcggcctcggtcacgcgcggcctgggaggcgaggccgtgcggacgagccgctgccgcatcgggttcgcggcggcggatgcggcgctggcgaccgtgttcttggcgtgcgcggcggcgacggcggcgaaggggctgatgggatggtagcgaacggatcggccgcggccgtttcggcgacgcacgtgtcgtttcggcacaagggtgcgtctgcgggttatgcgctcgacgacctggagctcgaggttccggcgggcgaggtggtggtgttgtgcgggcgctcgggctgcggcaagaccacggtcacgcgcctgctgaacgggctgatcccgcaattctacgagggcgatctgtgggggcgcgcggacgtgctgggcgtcgatccgtccgtcgagcccatcacgcgcctggcaaccctcgtgggcagcgtgttccagaacccgcgcagccagttcttcaacgtggacaccacgagcgagctggccttcgggtgcgagaacatggggtgggccccgacgctcatcgacgcggcgatggccggcgtcgtcgtgcgtttcgggctggaggacctgctcgaccgcaacctgttcaagctctccgggggcgagaagcagaagatcgcctgcgcgagcgtgtcggcccacgacccgcagctcctcgttctggacgagccggcgtcgaacctggacgtggcctccatccgcatgctggcgtccatcgtggcgcagtggaaggccgaggggcgcacggtggtggtggcggagcatcgcctgggctacctgctggacgtggccgaccggttcgtgctcgtggaggacggacgtgtggcctgggagaagacggcgtccgagatggccgcgctgtccgagggcgagctgcatgccgccgggctgcgctcggtgcggcccgtgcgcttcgagcgcgcccccgcaggatgcggcggggcgtcggccgcgcacgacgagccggccgggctcgaggtgcgttccctgcgcttcggctacgagaaggcgggcgtgccggacgtggacatggaggggctctcgtttccgcgcgggtccatcgtgggcgtgctgggcgacaacggcgcgggcaagtcgacgttcgcgcggtgcctgtgcggtctggagaagcgcgctcgcggcgaggtgtccgtgaacgggcacgcgtgctcgaacgcgcaacgccgaaggttgtgctacctggtcatgcaggatgtgaaccaccagctgttcaccgagagcgtgcgcgaggaggtggcgctgtcgctgcgcaaccgggcggagggcccgctgcgcggcgaggcggccgaatccgagatcgaggccgttctggccgggctcggcttgacggatctcgtcgaccggcacccgatggcgctgtccggcggccagaagcagcgcgtggccatcgccagcgccgtggccagcggccgcgaggtgtgcgtgttcgacgagcccacgagcggcctggattgggcgcacatgctggatacggcgaacaacctgcacggcctcgcggcgcgcggcgtgacgagcctggtgatcacgcacgatcccgagctggtggccgcgtgctgcgaccacgtgctgttcgtggaagggggccgcgcgtcctggtggggacgcctcgacgacgcgcaggtggcgaagcgcgtcgagacgttcttcggctgagcgctaggccgcttccgcgtccggctcgagatcgcgcagggcggttgccgcgccgggcgccgatgcgggcgatgcgtcgccgctcgcctcggagccgccgcggtgcttccacttcagcagcagcgcggaattcacgatgacgatgacggagccggcgttgtgcacgagcgcgcccacgacggggttcaggatgccggtcatggccagcgcgatggcgacgaagttgagcccgagcgagaatcccatgttcagcttgatggtggtcatcatgcgctgcgagatggccagcaggtggggcagtgcggcgatgtcgtcgcgcacgagcgcgatgtcggcggcatcgacggcgatgtcgctgcccgcgccgcccatggcgatgcccaccgaggcgcgtttgagggcgggcgcgtcgttgatgccgtcgcccaccatgcacacgggcgcgccttcgcgctcgaggcgctcgacggcggccagcttgttctgggggaggcagtcggcctccacctcgacgatgccggcctgggcggcgatgtggcgcgcggcctgggcatggtcgccggtgagcagcaccggctcgacgcccagcgtgcggatgccgcgcacggcggcttcggccgtggggcgcacggtgtcggccagggcgatgaatccggcggcctggccgtcgagggcggcgagcaccaccgtgcagccctgctcggcgaacgggagggccgccgcctgcagcgcgtcggctccgtcgacgcccagctcggccagcatctcgcggttgccggcggcgacgtcgcggccggcaaccgaggcgcgcacgccgcggccgggaaccatgtcgaacgacgacgggcgggcgagcgcgggtgcggcggaggccgcgtccgcggctgcggaggcctccgcggttgcggcctcgcccggcgcggcggccgcgcgctgctcccacccgcgcacgacggctttgccgagggggtgctcgctcatgctttccgcgctggccaccagggaatacagctgctcttcgtccaccttcgagccctcgatcgtcccgacggccaccacttcggggcggccgtaggtgagcgtgccggtcttgtcgaacgccaccttgcgcaccttcgccagccgctcgagcgcatcgccttcgcgcacgagcacgccgagcttcgtcacgttgccgatggccgccatgatggccgtgggcgtggccagcacgagcgcgcaggggcagaacaccacgaggatggtgacggcgcggatgatctcgccggtgacgagccacgtgccggccgccgcggtcagggcgatgacgacgatccaggtggcccatcggtcggcgaggcgcacgatcttggccttgccggcatcggccgactgcacgagctcgatcatgcgggcgagcgagctgtcctcgcccacgcgctgggcgcgcatgtcgaacgccccgaactggttcaccgtcccgctcttcacctcgtcgcccggcgccttgtcgaccggcagcgattcgccggtcatcaccgactcgtcgatggaggtgcgtccttccaggacggtgccgtccaccgccacggtttcgccgggcagcacgcgcagcacgtctcccacctgcacgtcctcggcggcgacgacggtttccacaccgtcgcgcacgatgcgcgccgtgcggggcgacagatgcacgagccgctcgatgccggcgcgggccttcgccaccgtcaggtcctccagcagcgcgcccagctgcatgatgagcgctacctcgccggcggcgaagtcctcgccgatggccaccgccgcgatgagcgcgagcgatacgagcacgtcggccttgatgtcgaactccgtcaccagcccgatgacggcgcccaggatgatgggcgcgccgcacagcacgatggcgatccaggccgggttgaagggcagcgtctcgggcgcgaagaagctgaatcccagcgcgacggccgacacggccagcagcgcgacgtcctttttcgtgccgcctcgatcgagcagttcttcgagtcgttccagcaagggtgcgcgcatggccatcgtctccttcatgagtagttctccggtgcattttggtacctatgggggtataggtataatactgcgcgagcgaagaattatccagaggtaacttttgaacatggaggaaggggcggggagggcgaatcggcgttgcgctgcttgccgggcgccgggggggggcagcgctcgcctggaatgtttcacgtgaaacatttgttctggtggcttgtttagcacatggccgcagaatgggatagagttcccggtcatcctgggcggaagcgcccgcagggcgccggtgccgaagggtcccgcgcggtgccagccggagcggggagctcccttccatccggcggtcatgcgccccgtttccggtgctccccggggaaggggcgggcgctcggtcgcgcggaagattagctcatgttggagaagcgctcgacggctttggtgaagctttcgatggtcttgtcggcgtcgccgtgctcgatgccgtcgcgcacgcagtgctggatgtggccctcgagcaccacctggccgcacttgtgcagcgccgacttcgcggcgttgatctgcgcgagcacgtcctcgcagggcacgtcctcgtccaccatgcggtcgatggcctgcacctgcccgacgatcttcttcagcctgcggtgcaggttatccgcgtccatgcattgcctcatggcgctcccttcgcttgcgactcgttgcgttcgggttctcattctaggcgaaaagcgggctgcgtgcacgacggcgtttccggggcgtcgtgcacgtcgatgccgtccggcgcgccggctgcgcggtagcggcgctcgtagcgggcggcgaacaccgcgagcagcgcgacggccgcaagcgagaagggcacgcccgccaggctcggcgaggcgtaggacgctccggcgttgagcacggcctggccgatggtggcgccgaacgcgttgcccaggttgaacgccacctgcacgcacgccgacccgatcatctcgccgccgccgcgccccaccttcaccatgagcagctgctgggggctcgacacgaagaacatgccgaaggcgcacaggaacatgagcccggccgccgtggcgggcgcgcccgagaacgcgaagatgagcgcgagcgtgatgcagccgatggcctggccggccgccgccatcttgccgggcgacgtgcggtcggtgagccggccgcccacgagcgagccgaccaccatgccgaagcccgccagcgcgagcagcgccggcagcgcgtcggacgggaagccgccgatgtccgtcagccacggcgagacgtagctccaccagcagaagatgccggtgttgcccaataacaccgcgccgatgaccagccacggacccggcttcttcaggaagcggaactggccggccaaccccgcgtcggggatggggcgtacggcgggcacgaagcgcgcgatcagcaaaagcgagccgacggcccatacggcgacgaacaaaaacgtcgcgcgccacgacaaaagggctgccagcagcgtgccgccgggcacgccgaccatgttcgccacggtctgtcccagcaccatgatggacacggcttggccttcgcggccggggtcggccagctcgcgcgccacgatggtggcggtgccgaagaacgcgccgtgcggcagtcccgacacgaagcgcgccgcaaccagcgcttcggcgctcggcgcgcaggcagccgcggcgttgccgacggccacgagcgcgacgaaccccagcagcagccgtttcggcggcacgcgccgtccgaacacgaggaacagagtgcccgcgcacacgcccaacgcgtaggcggagatgaaatcgccggcgtcgggcacgctgacgcgcaaccccgtagccgtcgcgggcaggatgcccatcatcacgaattcggcgaacccgagcgcgaacgatccggtggcaagggcgagcaggcttttattcataggatggatggttccttcgggacggggagtatcggattgcggcgagaggagcgctctttgccgcgcgggtttctcgcgaagccggcttagtatgccatcgccgcgcttcgggcgggcgaaacttgtcgagaatatgacaaaccttccatcggacggcctcggagagccggcgtgcttttggagattgtccggagacgttagaatacgatagcttgtgagtagcaattatgagaaagttcgctttggataacaacttggcgaagacggatcccgccggaagcgtcttcaagagataggagcagcaactatgtccatgatcaacaaggaaatcgacgacttcaccgtccaggcgttccataacgacgacttcgaaacggtgacgaaggacgacgtgctggggaagtggagcgtgttcttcttctacccggccgacttcacgttcgtgtgcccgacggagctggaagacctcggcgcgctgtacgacaagttccaggaggcgaactgcgagatctacgcggtgtcgtgcgatacgcatttcgcgcacaaggcctggcacgacgcttccgagaacatcaaaaacctgccgtatccgatgctggccgaccccacgcacaagctggccgacatcttcgacgtgtacatcgaggaggagggcgtggccgagcgcggcagcttcatcgtgaatcccgagggcaagatcgtgtgctacgaggtgaacgccggcaacatcggccgcaacgccgccgagttgctgcgccgcgtgcaggccagccagttcgtggccgagcacggcgactccgtgtgccccgcgcgctgggtgccgggctccgaggtgctccatccgggcatcgacctggtgggcaagctgtaagcctgcatcggccgcgcatcattgctcgagcggaaccgatcggcgcccgatcccctgcggggtcgggcgttttcgcgcttacgttcctacgccgagaacagcttgcggatttcggctgtcagctgcttgcgcgcgaataccacgagcccaagcaggaacacgctggcggtgagcgcgctcacgagcgaggggacgtcccacgtagtgagccccagcgcctgcagcgccagcgggatgaggcccagccccacgtcgaacagcaggtacttcgcgtagcccgagacgaacgtgccgcggaacaccgccagcagcacgccgtcgaacacgagcgccaccaggcagatgccgggtatgacgaaggtggtgaccaccgggttgcgcgaaacgaggaaccagatggcggcgatggccagcagcacgaggaagtagcgcgccacgacgcgcaggaagtcgggcgtgtgcgtgaggatgttgcgcacgaacaggtagttcaccacgaggccgacgcagactgtgaccacgatgtcgcccggaagctggagcagatgacccaagaacagcatcaccagcaagcacgcccccgtggcgaacgccagcaccgccagcgcgatggcgcccgacttgcgcacctcgttgcgcgggaacaccgcgggcgacgcgtcgcccgaaagctcggcttggcacaacgggcaccggtcgaggtcgcccgagaactgcacgccgcatttctcgcatcgtttcatcggccgtcgtcctccctcgcgtccgtctcgttgtgcgccggcgcctcgctcttcgcgctcgcgccttcgcgtgcgggggtttgccctccccagcgcttcaccgaggcctcgatcttggcttcaagacggtcttccgccacctcttcttttgtcttgttgatgttgatgcgcccctcgatgccttggccggagaagaacctgcagatgttcttgatgacgtccgggttcgagtacaccgtggagatgccgatgctcagatcgtcgccgaacgcgcacatcaggaagttcaggccggtggtcgaggtcaggatgttgacgtcgcgaatatagggggccaggcgttcgtcgatgcggatggggccgaggttcgacatagtggtggtcacgtcgcgcgcggccaggcggttcgccagccccaggatgaagtccttcgcgaacagcggcgccaggcgcagaagcgggttcttctccagcgcgatcatgcggttcatgcggctcttgagctcttcggcctgcgtggcggttttcagctgatcctgcacgatgcgggcgatcgtctccaccggctcgtcctcgtcgccgggcacgtaggatacgaacgccagcccgaagaagttcttgacggtggtggatttgaagaactggcgcaggtcgaccggcacgtccatgcggatggcgcggctgcggtcgcggcgcggcatttcggcgcggatggcgcacatgatgacggcgatcacgagcgcggtcacgcctacgtcccagctgcgcgccagggcgagcacgcgcttcgcggggaggtggtactcgaagaacgtgggatcggcctcgtcgcgccagcctttcagccggtataccttcggtgcccgcgttgcggcggctttgtcgcgttcgaagtatttgtcgaagctgttctcggacttctggtggtctgagccgtcgtattctgcgggcacgcccttcacgccgtagcgctcctcgatgtaggcgtgcagcagggccttgaagaagctgagcgagccccgcccgtcggacacgatgtgcgacacctcgaggttgatgcgcgcggcgtggtagctgacgcggaacagcacgcttttcgcgtggacgtgcagtccgtagcagatggggaggttctcctgctgcacgacggggacctgggcggactgttcaaggtagtgccagaacatgccgctgcgcaggcagacgttgaagttggggaagacgcctgccgtcttctcgagggcatgctgcagcgcagcgggatccacatcgtcttgcatggtggctgcgtagcggaacaccgtctgggccgagctgcccgcctgggacgagtagaacttgccgacgttgtctagtcggtaccaagtatcccgagccatgcgggttcgccctcctgcgtgagatcgtcgccgtccaagaaatgcttgatgatgcggtacgtgtccttgaccaggctgagcaccgacggatacagaaggtagccgtgcacggcgtcgagcatgcggtagcactgcacctcctggtcgccttccagctccaaccgcgccgcgtacgcttctccctcgtcgcgcaacgggcagtactcggcgctgatgaccagcgtgcgcggttgccgcgacaggtcggggtcgagcagcggcgcgaagtaggggtcgtcgaaatcggcgggcgccgagcggtacaggtccatgtagccctcgatgtcgcgccaggtgagcaggtagtcctcgccgttctcgcgcaccgagtcgaaccacgacgtgaacgggtcgtggtcgttgtacgtgacggggtacagcagcatctgcgtgcgcggctggaagtcgccgcggtcgcgcgccatgagcgacagcactgccgccaggttgccgcccgcgctgtcgccgaacagcaccacgttctcggggtcgacatcctccagcagcgtgcccgcgtacagctggcgcgccacctcgtagcagtcctcggccgcctgagggaagcggtgttcgggtgcgcgccggtagtcgaccgacactacgcgtcgctccagttggatggccatggtggtgcacgcgtcgatgtagaagtcaaccgtgccgttcacccagccgccgccgtggaagaacaggacggtgccgcgcgagtcctcggataccttcagcccctcggccagcgagaaatcgaagtcaagcggcgtgaacacgcgcagcggcacctcgaagccgtcgggcatcgtggcgaaagcctcgtcgatgcggcagcgggggttgggcagcacgagcttggcgctgacgtcctcggcgaggcgctgcgttttgtagaactccctgatgtcgggccgaagccgtgttgccgccttgaacgcggcaagaaccgccttgttgatgggcatgcatgccgtcctttctctgaacctcatcgtagcataagcgaaccctgccgagcagggcgttacgcaaggctcatccaggtatcgggcagatgtttttatcttgtcgagaggagatttaccccaggtcgatcaccgtggtgacgctgacgggggcttccggggattccgtctcggcgctccagacgctcacggcgggggccggatcctcgccagcgtcgacggccttcatgacggctttccattcctcgcggctttcgggcacgagccataggccgccggcttcctccaggaaatcgccgtagtaggggccggtggtgctgtgcacggtgatctcgtcgccacttgccagctcgtccgcccaggccagctggtcgtcgagcggcacgttcgtttccacgaagccctgcagaagcgtcagcagggcgccggtctgcgcagggtcgtcgtacgccagctcgatgaaccgcgtcatcatctggcgatccaccacctggcggatcatctcctgctggtagccggtgtcgccgtagccggtgcgcgcacgtgacagcgccatggcgcgccacggcgtgagcgtctgcggcccggcttcgtacacctcgtcgggatggtccttcgtgtagaagttgtacgtcagcccgtagggcaggtccacgtcgaggccgccgaagtgctccacgatgctctgcagcccgtcgaagccgaccaccacgtactgcgagacgtccacgccgacgacgtcggacacggcttggcactgcgcttcgggaccggcgttggtcagcatctggttgagcttcgcggtgttgccgtcagggaaaacgtaggcggtatcgcgaggcacgctgacgagcgtgatcaggtgcttctcgaaatcgaggcgcatgagcatcatgaggtcggcgtggcccggcgtgtactcttcccaggagtcgtcgccgatgacgaggatgtactcggggtcgggcaccgggggcgccggcgtgtcgttcacgacgagcggctccggctgcgcttgctgcgccttttcttgcgcggacggagcagagcaggcgccgagggcggctgcgagcgcgatggcggcgaggagcgcgaccgtcctgagggtcttagtcagcttgacgttggaagcgatgggggacatgtggaccgccttctttccgcgtgcgtttcgtctcgatctcctccatgataccggatggcccgttcgccgagcgcgccgtttcgtcggacgacgcgaaccgcgtgcatcgtccggctacgcgtcgagtggtttgtcggcggggaggccggccagggcgtccgcagccagctggagcgcgtcgacgatgcagccgtcgcagctgcgcaggggctgcttggtcttgatccccttgagctcagggcacagggtggagccgttttgctcgcggaaatcgttcacgagcttccgcacgatgcggtacgtcgcctgtttgctggtgcggtcgtcttgtccgttgctgttcgccaggccgatggccatggcggcgcccgatacggctccgcaggtttcggtgaggccgcccatgccgccgcccagtccctcggcagcgcggaagcacagctcctcgtcggcgccgatcagcggggcgagcgtgcaggcgaccgcctgggcgcagttgtacttcatgccgtgcagctccagcgcgcggcgggcgagcgcctcgcggtcgaaggggttgcgcgtgcgggggtcttcgatggtcatggatcggtcctttcgttcggtcgcagctatgatagcgcgtcgccggctctccgtggtcgtgcggtttcctttcgggtatcctgaaacggttacggaagagcggcgccggaaggagcgggctgtgggcgagcgcaccattctcatcgtggaggacgacgcggacatcaacgcgctgctggcgaagatcgtcgcgcgcgagggattcggctgcgtgcaggcgtattcgggcaccgaagcgctgctgcagatggaacgcgcggcgttcgatctggttctgctcgacatgatgctgccgggcatggatgggccgacgttgatggcgtgcatgcgcgacgagctggcctcgcgcgtgccggtgatcgtggtgtcggcgaaggcgggctcggccgacaaggtgggcatgctcgcggccggcgcggacgactacgtgacgaagcccttcgaccccgacgaggtggccgcgcgcattcatgcggtgctgcgccgcgctgcgggagcgagcgcggctgcgggcgcgggcggcgtctgccccgacgacgaggcgcttgtccatcgcgacctgcggctggacgtcgcgcgccgccgcgtgacgctcggggatgccgaggtggcgctgaccgcgcacgagttcgacatcctgcacgtgctcatgcgctcgcccgacaaggtgttctcgcgcgagctgctgtacgagctggtgtggaaaaacggctattacggcgagcagaacgccgtcaacgtgcatgtcagcaacatccgcaagaagctggcggcggccggaggggcgggcgactacatcaaaaccgtgtggggcatcggcttcaagctggcatgatgcgggcctttacgctttccttaacctttcttgaggacttatttccaggctgcatcgtatcgtttccccaagacgacaaggcaagcggaagaaagggagaaacgattccatggacacggtgatcgagacgagggggctgacgaaacgctacggcggggacgtctgcgcgctgtacgacgcggacgtgagcgtccgccgcggcgacatattcggcgtggtgggcgacaacggcgcgggcaagacgacgctgttcaagctgctgtgcgggctggcgtttcccacggagggcgaggtgcgcctgttcggcgcgcacgagccgcgcgagttggagcgccagcgcacgcgcatcggctccatcatcgagagccccggcttctatccgggtttgagcgtggagaagaacctggaatgctgccgcatacgcaagggcgtgccgggcaaggacgcggtggcgcgcgtgctggacaccgtggggctggcgtatgcgaaggatcggcgctgccgcacgctgtccctgggcatgaagcagcgtcttggtttggcgatggctcttttgggcgagccggaggtgctgatcctcgacgagcccacgaacggcctcgaccccagcggcatcgtggagatgcgcgcgttcctccaagggctcaaccgcgacaagggcattaccatcgtgatatcgagccaccacttggcggagctcgagcagatggccacgacctacgcgttcctgaaacggggttgcgtggtggagcaggtgagcgcgcgcacgctgcaagagcggtgcgccgactacgtggacatcgccgtgtcggatgccgcgcgcttcaccgcgctgctggagaaggagctgcgtcatgagcgctacctggtgctgctggacggcaccgtgcgcatcttcgacccggcggcgggcatcgaggcgtatagcggcctggcagtccgagcgggcatggacgtgtccaagctggagcgcaggaagatgtcgctcgagcagtactatctcgagctgaaggagaagggggtcgcatgatgctgaactacacgaagagcgaactctaccgcatcgtgcacggccgggagctgtacctgttcaccggcgtgttgtgcgctatcgtgctgttgtcgagcgtattgctgtgggcgatggcgagcacgcccgacttcccctacgccaccgtgcggttctcgctcagcaatctgatctcgatgctgccctcgctgtttctgctggcggggctgctcgtctgggtgctgttcgccgacgataggaaggacggcacgttcaagaacgccgtcgcggacggctgctcgcgacgcgatctgttcgtgggcaagtgtcttgtgtccacggggctggggctggccagcatgatggtgatcctggcggtgtacgtgggcagcgccgtgctgctgctggaggggcccgcagacgcggtgcccatcctgctcaagggcgtggcggcggcgctgccgttcaccgtcgcctgcgttgtgctgggcgttgcggtgtgctccgtgctgccgaagacgagcgctgcgtttctggtgtggttggccatcgtggccatcgtgccttcggcgctgcacgcggtgggaatggtcgtggagccggtgggcgcgctggccagctggttgccgtacaacttcttctccaacgaggtggccatcaaccagagcggcctggccgagtttctgtgggacacgccggcgggtttggcgaagtgcctgatcgcggggttcgcaggcgtagcggtgttcggcatcgcgggcctgtggcgcgcaagcaagagggagctgtaggggcgcgacgggaaaggatgcggcaatgacggcagtcctcggggcggtggcggttctggcgctgggagcggcggtgttcttcgctgtgcgctgtgcgctgctcaagcgctcgcttcggcgggcgaacggcgagctggccgaaatcgtgcgcggcctcgaggacaaccgcatcgtgaagctgccgcagcccgacaaggacttggaggcgctgctgggcaccgtgaaccatgcgcttgcggccgtgcgcgagcagggggttgcgtacgcgcgccacgaggccgagctgaaggcccaggtggaatccatcagccacgacctccgcacgccgctgacggctatcgtggggtacttggcgcttctggatgaagagggcatggacgccgatacgcgcgcgtcgcttgccacggtgcgccgcaaagccgacgcgctgcagcggctgatcgcgcagttctacgagctgtcacaggcacgcaacgaggatgcgccgctggcgtgcgagccggtggaggcgggccgtttggtgcgcgagtcggtggcggggcgctaccgactgttcgaggagcgcggtttggaagtgcgcctgcgcgtgcccgaccggccggttcgcgtgcggggcgacgagggcgcgctggagcgggtggtggagaacctcgtgcacaacgccggcaagtacgcgcgctcgaccttcgacgtggaggtgggggaggccctcggcggccgcgtgacggcgacgttcgcgaacgatgtcgacgcggcgttctcctgcgaggtcgaacggctgttcgagcccttctacaccgccgacgcggcgcgctcgggcgagcggtcgggcctggggctggccatcgcgcgctcgctggtcgggcagatgggcggcacgctggacgcgtgcctggaacagcgcgaaggcgagcgctggctgtgcttgcggctggagctggcggcgatcggctgacaagggcctccggtatcggcgggaaccctgtgggccgcgaaacgaccgcggccgccccggaggacggccgcatcgagaagaaggcggaagagggaggggtcccgccttcgtgggtcggtcgctcgcgcttaggcgaagtcgagctcgccgatggtcgtgtccttggcgcaagcttcgccgaccagctggccgaacgtcacgcagcggccgtggctgacgccggggcagtgcaccgggtagtccttgccgaagaagtcgccctgcacgttgccgatggcgaacaggccgggaatcggctcgtcctcggcggtgagcacctgggagtcggcgttcacgtggaggccgaaggggatggtcagcgtggagcacacgttcttcgtggcgtagaacggcgcggtcttcacgggcgcgagccactgcgcgggcacgtcgaagtcgacgtcctcgccggcctcggccatgctgttgtagcgctcgacggtggccttgaacgtgtcggccgggatgtccagctgcttggccaggtcatccagcgtgtcggccttgatcagcttgccgttgcccagccacttctccatgacggcgtccagcccgtcggtgaagcgatcgtagcgctcgggctgctgctgcatgatgtaggtctcgtagtccgagtcgaagatggaccaggccacgttgcccggggtgttcatgcgggcgttcgtcagcatgggctcgaagggcatctcggcgccgtagcgctcgccgttggcgttcacggcaagccagctcatgatgaacgaggtcaggttgaactcgagcgtgtccagcgtgaactggtggatcatcggggcggcttcgctcttcgacatggccgcgccggcccacatgcccatgagcaggccgtcgccgttgttgaacccggccggcgcgtagcagttggagtccgagcggttcgagatggggcagaacgcgtcgaccatctcctggttgccgccgatgtcgcccgtggccaggatcacgcccttcttggcgttgtactgcacgtgcttgccgtccttcgtggtggcgacgacgccggtgatgccgcttgccgcgtcgcccaccagctgctcggcgcgcgcctcgaacacgaactcggcgccgttgtccatggcggagttgtacacgagctcgcccagcgtcacgttgaccggctggccgtcatcgcgcatgtcgtacgtctcgccgccgcgcacgaaggagacggcatcgggatagacgcgccaacggtcggacagcgtggaccagttgccgtacttcgcggtgccggacagcgcgggcaccatgctcacgccgttcttggatcccagatcctcgatgtagtcgaacacctcgccggagcgcgacgcccacacgtagatgaggtcgtagttcgtggtctggtgcgacgcctggtgcaggaatcgcgcagccacgcgcgggtcgaggtcgaaaccgttcgatttgtggtgcttgctgccgatgtgccccacgtccacgccgcgcacggagaacgtggtgttgcgctcgatgaccaccgtcttcgcgccgttgcgggcggcggcttcggtggcgttgatgcccgccagacccgcgcctacgaccaccacgtcgaagtcctgcgtctcggcgatgtcggcgatgggctcgggcgcgacttcccacgtatgcttcgcgccggtcgtctcgccgcccttcgacgagctcttggcgtcggatgcgtcggacgatgcggccgggctgcatgccggaagcgcgacggcggcggctgcggcggcgccggtgacgagcgcgcccttcaagaaattcctgcggttgatatccatccagataccccttccctcgggacccttcgcgggccctctccctttgcgcccgcggggcgggctgcgcaacggtgcgttgcgctgaaagcagggtgcgggaagacgcgcggccgcacaacgcgcaaatgaccttatttgcgaatatcaggcaggtcccgtgatctagcgggcttgatcacgtggttcgggtgatgccgtctgatcaggtgaaagaaccgaatctatgaattgctggcgatcgtgcacgtccgctttctggtagatgtggcgcacgtgggtgcccacagtgttctccgatatgctgaggcgctcggcgatccagggctgcgtgcggccgtacgccagcagcaggccgatctcgcgctcgcgcgcagtgaggccgatgctgtcgaaccaggcgtcgatgcgctcttcctgggtggcgcggtcgtcgccggaaaggctcggctgctggcgccccgtcagcatccacatgtcctcgctgctgagcagcagcacggtggcgatgaccacgaggtagccaaccacggtggtctcggccgccacgttgccgtgcatcgtctcgccgttgcctaccagcatgatgcccgcgacggcgcccaccgggtagcacagcacggccagcagccgcatgagcgcgatggttttcagcgggtcgcgcgactgcgcgtaggcgatttgcgagaaggcgacccagatgagcaggtcgaggatcgtgtagccgctgatgatgatggcgcccgacacccagaacaggttcgtgccgaacagaaacgccatcagcatgaagccggcgatcatgaccaggagccccacgcggtacaccgcgcttgcccggcgccgtcccaacacgacgatggcgaacacgagcaccgccgtgacgccgcgcgcgacttgcacgaggatgccgttgggatagccgtcgctggcgataggcgagaacgaaacgaggtgctgcaggtagccgaacccggtcatgacgagggccacggcgcacaacagcatcatcgaggttccgaggtgcgctttcaggcgcgagcggacgctccgcttcggcagcgggtcgacgggggcggtgcggcggtacgtgcgcaactgggggtcgatgctcgcgaacaacgcgcccgagacgaggggcagcagcgccgagaacacggcggcggcctcgggtatcatgaacagaagcggcgcgtcgacgacgatggcgcaggcgaagccgccggccacgtagggcgtcgcgctccgctcgccgtcgtggcagtacgcagcgccccatgccagctggtaggctgccatgaacgcgccggcgcaggttccgccggcgacgagcgcgatccagttgaggttgatgccggcaagcaggagcagcagcgagcccgccgtgcccagcgcggcgaacgcgagcggcacgcgcttcttcgccagcaggccgttgcatgcggccggcttggccagcgacagcgcgagccacggcaggctcagaccgaacacggctatagtggccatctcggccatgaagccctcggcctccggccggacgaaaaacatgctcatgaacaacgcgtcgagccaagcccagaaaaaagccgagccgatgatgattttgatgccggtcgtcccgtgcacccgttccagcgatttcatgcatccccttcccacgtatgcaagattataccccagcagccgaaccgcaccttcgcgcttggcaaggcgtgcactgctcgtgacggttctcggagcgaggaggcaatcgcccgcaggcgcaggaggtggccgacgagttgggcatcgaaaccgtcgagcccctcgtggaggggatgtcgtgggggacgggagctccgtggaagtggtcgtcggcgccgactagtacgatcgcgcgaagaagtaggcgaccgccctgcgtcgcctgccgtttcttgcgcgctcggcgggtcagttgccttcgtcgatgtggtgggcgttgcctatccgttccccaatatgttgcgatttttgtaacatattgtgatacgatggtcgctctcaaaacgcaccgcaatcggagaacgaagggcgagacgacatcatgcagatttccaagcgcaacggcaccgtggaagcctacgaggccggcaagatcaagcgcgccatgggcgcggccttcgccagcgtgggcaaggttctggacgacgaggaggccgaccgcctcatcgcgcgcatcgagcgcgcgatggcgagcgcggagcagggcgaaggcggctccgtctcggtggaggacgtgcaggatctcgtggagcgcgccctcatggaagcgaaccattacgaggagctgaaaagctacatcctgtaccgcgaggaccgcgcccgcaagcgcgtcgcgcgcgagcgtttgtgcgcccagctgccgagcgtgcccgcgctgccgggcgtgctggcgtcggtgcagaaggagttccccggcgaggagtacgagcttgcccacctcagcgccaagttccagtcgttcgccaagcccgacgctgccgacggccagttgctggccatgctggtgaaggcggcggtggagctgaccacgcaggaggcgccgcgctgggagatcatcgccgcgcgcctgctgatggtgcagttcgaccgcgcgctggccgagcgcttggcagcccggcacatcgagacgttcgcgcagaaggtggccttccttaccgaagaaggcctgtacggcgactacatcctgcagcattacacgcccgccgagctggacgaggcggccggcttcatcgatcttagccgcaacgacctgttcacctacgcgggcctgcagctgctgctcgaccgctacgtcatccgcacgcatcagggcgcgccgctggagtcgccgcaggagatgttcctcggcatcgcgctgcacctcgctatggaggagcgcgcgtccgagcgcatggggtgggtgcgccgcttctacgacatgctgtccacgttgaaagtgaccatggccacgcccacgctgtcgaacgcgcgcaagccgttccatcagctgtcgtcgtgcttcatcgacacggtgcccgatagcctggacggcatctaccgcagcatcgacaacttcgcgaaggtgagcaagtacggcggcggcatgggcctgtacttcggcaaggtgcgcgccagcggcagcgccatccgcggcttcgacggggcggccggcggcgtcatccggtggatccgcctggccaacgacacggccgtggcggtggaccagctgggcatgcgccagggcgccgtggcggtgtacctcgacgcgtggcaccgcgacctgcccgagttcctggccctgcgcacgaacaacggcgacgaccgcatgaaggcgcacgacgtgttcccggccgtgtgctatccggactacttctggcagcaggcgcgcgacaacatcgagggcgactggtacctcatgtgcccgcacgagatcctcacggtgaaaggctacgcgctggaggactgctacggcgaggaatggacgcgcaagtacctggagtgcgtggccgacgcgcgcatcaagaagcgcgcgatccccatcaaggacgtcatccgcctcatcatcaagagcgccgtggaaacgggcacgccgttcaccttcaaccgcgacgcggtgaaccgggcgaacccgaacaagcaccgaggcatgatctactgcagcaacctgtgtaccgagatcgcgcagaacatgggcgccatcgagcagctcgagcagcgcatcgaggacgtggacggcgagcaggtggtggtcaccgtgacgaagccgggcgcgttcgtggtgtgcaacctggccagcctgtcgctgggccatatcgacatggacgatccgcacgagcttgcgcacgtcacggaaagcgcggtgcgtgcgctggacaacgtcatcgacctcaacttcttcccggtgccctacgccgagatcaacaaccgccagtaccgtcccattggcctgggcgtgagcggctaccaccatctgctggcgaaaagcggcatccggtgggagagcgaagagcatctggccttcgccgagcgcgtgttcggcgacgtgcattacgcggcggtgcgcgcgagttgcgccatcgcgcgggagaaaggcgcgtacggtttcttcgagggaagcggctggcagacgggcgagtacttccgcgaccgcggccttacggacgggcgctgggccgagctcgcgcgcgacgtggccgagcacggcctgcgcaacggctacctgctggccgtggcgcccaccagctccaccagcatcatcgccggcaccactgcggggctcgacccggtgatgaaccgctacttcctcgaggagaagaagaacggcctcatgccgcgtgtggcgcccgagctgtcgatggacacgttctggtactacaagaacgcccatctcatcgaccagacgtggtcggtgcgcgcctgcggcgtgcgccagcggcacatcgatcaagcgcagagcatgaacctgtacatcacgaacgagtacacgttcaggcgcgtgctggatctgtacctgctggcctgggaggaaggcgtgaaaaccatctactacgtgcggtcgaagagcctggaagtggaagagtgcgaagtgtgttcgtcgtaggttgaacctgggggacgggagggggtccggcatgttcagtcgctgagctccacctgcgcgacggcagccggggtgcggtgcccagtcgccgggttccacctgtgagatggggctgggggcaatgcccagtcgctcagacagtcctcgcttcgctgcggaactcgcttggtgggcaccgcacccagccccgacgtgatggaactcgcttggtgggcactgcgccccggctgcctgcaagcaggtcgcttggtgaacacgccgggcaccccctccctggtcgtggttcgacctggacgggcgtcgcttcgctcgcccaggaggcttttgtttgttcgtagctgattttctggaaggaagagtttgtatgagccagttgaagaagaagccgctgttcaatcctttgggggataccgatgtgctggatcggcggatgatcggggggaatacgacgaacctgaacgacttcaacaatatgaagtacgagtgggtgagcgactggtaccgccaggccatgaacaacttctggatacctgaggagatcaacctcggggtggacatcaaggactaccgcaagctgcccgcggccgagcggcgcgcttacgacaagatcctgtcgttcctcatcttcctcgacagcctgcaatcggcgaacctgcctgccgtgggcgagtacatcacggccaacgaggtgaacctctgcctggccatccagacgttccaggagacggtgcacagccagagctatagctacatgctggacaccatctgcgagccgcaggagcgcaacgacgtgctgtaccagtggaaggaggacgagcacctgctggcgcgcaacgagttcattggcaacctgtacaaccagttccaggacgacaagagccccgaggcgctggcgcgcgtgctggtggcgaactacatcctggagggcgtgtacttctacagcggcttcatgttcttctacaatctggggcgcaacaacctcatgccggggtcggtgcaggagatccgctacatcaaccgcgacgagaacacgcacctgtggctgttccgtaacatcctgctggagctgaaggaggaggagccggaactgttcgcgcccgagctggtggaggagtaccgcgccatgatcaaggagggttgcgagcaagagatacgctggggccactacgccatcggcgacgaggtggccggcctcaacaagcagatggtgaccgactacatccagtacctgggcaacctgcgctgcacgcagctgggcttcgagcctttgtacgagggccatgagcgcgagccggagagcatgtcgtgggtgagccagttctcgaacgcgaacatgatcaagaccgacttcttcgaagcccgcagcaccgcctacgccaagtcgagcgccctggtggacgacctgtagggtgcgagtcgctcccgcttgcgcaccctcgttggcgggagtttgggcttgctctcgggttgcccgtctcggtctgccgtgcacgaaaaacgctgcgcgctgcacaaaaaacgccgacgtatggctttggaaggtcttcgcgtctatctcccgcattgcggctgcgagagcctgcgatcctgatcgggcattttggggacgcgctgtcgacggctctcagcgttcggccccttcgatatcaaacgtcgcgggtttttgtgcagaaacgcccgggtttcttgcagcggtcccgtctgcgtctggcgctacccgctcatcgctttgggtgatgcggtgaggatggtggcgggggagcggtgcgcgtgcttcgtcgggctatactgtcaccctatggaaaccgacgaaccgaagcgcggcatacggaagttcttgctcaagcggatgctgttcgtaccgttcggcatcgtcgcgcttgcggcgacctcgtacgcgcggaagtatcccgattgggcggagcacgtgtacgcccagggcgtgtacccggcgctgtccagcgtcgtgggatttctgccgtcgcttgtgagcttctcggtggccgagtgggttgcggcgttgttcctgctgttctgcgtgggatacgtcgtgtactgcgtccgcaagctcgtcgtgagcaagggcgagcgcggtacggtcgcctaccgtgccgtcatgggggctgtgtccatctgctgcgtggtgtatttcctgttcaccgctttgtgcggactgaactactaccgctacaccttcacccggcacaccggctacgatgtggaagaagccgacgttgatgcggcgcagcgccaggaggagctcgtgcggctcgcgtcctccctggccgacgacctgggccagacgcgagcgcagctgggcgacgacgcggacctgttcgacgccgagcccggccagttcgagcagtacgcgcaggagtcggtggaggccatgcggaagctggccgagcagtacccggtgctggatcggccgctgtactcgccgccgaagccggtgctcgcctccgagctgatgtcgtacgcgaacatcggcggcatgttcttccccttcacgatggagtcgaacatcaacgtggacaacccgttcttcgtcgttccgtggaccatgacccacgagctggcgcatcagtgcggcttcatgcgcgaggacgaggcgaacttcatcgcgtatttggcctgcaagcagtcggacgacgcgctgatgcgttacagcggctacttgctggcgtacgacaacgccgtatcggcgctgaggaaggtggattcggaggcggcgaaggcgatcggctcggggctgtcggcggcggtgcggcgcgatctcgcccagcgcgcggagcactgggcgcagtacgagggcccgatccaagacatctccaacgccgccaacgacacctacctcaaggcgaacgaccaggccgacggcatgcgcagctacggccgcatggtggacctgctgctggccgagcagcgagccgaaggggagggcgcctagccccagaaccccgccgcctccgcttcttgcatgatgacctcggcgggcagcagcgtggcgtcggctatgtcggtgccggtggcgtccaaatagcggcgcaccaggtggtatccgcaagcgtatccggcgcagtagggaaggcccaccgtcgggtagccctgcgccgtggcgatctcgtcgccgtagaggtacgccgacagccctgccatgccctgcacgtcgagggcggcgcgaatggcgggcttgatcgtcttttccagcgcgtcggcgctcgtcttcgtcacccagggcccggcgtgctcttcgccgtacaggctgacggcgaagttctcggccagcccttcgctcaccatcatctcgccgagcgtgatgtcgtcgtgccaggcgacgaactggaagcgcacgttgtggttcgtctcgtgcgcgagcgcggcgggcagccggcgcacggtatcgtcgttcggcacgagccacgccaggatgtagccgggtatgccgccgtcgccgcagtagccgtcgctcgcggctagcgcagggctgtcggggtcgcccagcaggacggagaacaggtagtcctgcacgcgcagctcgatgccgcgctcgacgaagcgggcgagcgcgtgctcgacggcctgccggcttgcgcgccacagctcctcgtcggccaggcgccgaacggcgtcggcccagctctggtccacacgctcgggcggcaggatgcccagcatctcgctggccatcaccgcgtcgtagccgccgggttgcgcaggacgcagcggcacatggtaacagtcccatttcgccttgaacggcgccatgagctcgtgacggtagaggtcggcgcgcttttccgcgggtgcggctatcatgcgggcgtacgcgtcgcccgtgcgcagcgcgcgcacggcgggcggcgcaggggaagttgaggcggcgggtttcttgcgggacacgggatctcctttcgtcgggggagccccatcctacgctctcacgtcgcgtgagggtcaatgccccgagctccatttcttcccggcgcctctcatcaggcagaagggctataatgaccccatgtcagccgaaggggaggagcccttatgatcgtgcttgccgtcgtggtcgcgcttgtcgcgctgcttgcaatcgtgctggtggcgaacgcggcgcgtctcaagcccacgcccgtttccaacccgctgccctcaagcgacgcgcgcggcgacgatgccgcggtcgcgcgcttccaggagctgctgcgccttcccaccgtgtgggacctgcacaaccccgacgccgaccgcagcgcgttcgacgagttcgtccccctgctgcgccgcctgtacccccgcgtgttcgatgcttgcgagctggagctgatcgacggctacggcatctcgcttctgtggaaaggcgccgaccgcgcgctggcgccggtggtgctcatggcgcaccatgacgtggtgtctgccgacgcgtccgagtggacgcacgaccccttcgccgccgatatcgcggacggcaagatattcgcgcgcggcgcggtggacacgaagtgcatctgggcggccctcatggagtcggccgagcatctgctggcggaagggtacgtgccgccgcgcgacgtgtacttcttctcgtcgaacaccgaggaggacggcggcgacacggccccgcacatggtggagcgcctcgaaggcatcgggcgcgtgccgtacatggtgctggacgagggcggcgcggtcatcgacaaccctcccctgggcgtgaacggccagttcgccgtcgtgggcgtggccgagaaaggcatcttcaacgcgcgcatcgccacttgcgccgagggcgggcacgccgcaaccccgtcgcttcaagatgccacggcgaagctcgtctcgggcctcgacggcttgcagaagaacccgccggcgtccaaactgtccgctccggtggcggccatgctgcgcgagctggcggcgcacggcggtttcgggttgcgcatcgtgttcgcgaacctgtggctgttccggcccctggtcgtccgcatcatgcagggcgactccgagacggcggccatggtgcgcaccacgtacgcgctgacgcagctcgaggggagccctgcgcacaacgtcattccgaagggggcgggcgccacggtgaacgtgcgcgtcgatccgagcgaaacggtggacgcggccttcgcgcgcatcaaggagcgcttcgacgaccgcacgacgtacgagctgttcgaggtgagcgagccttcgcccatcgcgccgttcgacggcgatcccgcgttcgagtacctgcgcgccgtcatccgcagcgtgtaccccacggccggcatcgcgccgtacgtgcagaccagctgcagcgacgcgcgtcatttccatcgcatctgcccgcgcacgtaccgcttcgccggcatcctgttcaagggcgaccagcgcaaccgcgtgcacggccaggacgagaacctcgacgtggacagcttcaagcgcggcgtcgggttctacaccgaattcatccggcatctcgaccgattggggaagtgaggcatcgtggccgacgagagacgagccgcaggggcggcaggcgcggcgaaggcgccgaagcaggggaggttcttctacgggtggtggatcgtggcgggcggcctcttgatcatggccacctgctacacggtgttcgtgaactgcatcccgctgttccagacgcacatcgtgcgcgacctggggctgacggtggggcagttcaactcgggcgtgtccatcaccacggtggtggcggtgttcgcgtcgctggtcatcgggcggctcaccgacaagtgctcggcgcgcgtgctgggcacggtgacggtgctgaccagctccatcgtgctggtggggctctcgttcatcacggccgtgtggcagctgtacgcgctgtgcgtggtggccggcatggtggtggtggccggcacgcgcctcttggtttcggtggtcatctcgaactggttcacgctcaagcgcgggctggcggtttccatcgcgttgtcggggtcgggcgtcggcggcgtcgtgctgtcgccggccacgagcgtcatgatcgaggcgtccggctggcgcgctgcgttcctgctgctggccgtcgtgtgcctcgtggcggcgttgccgctcgtgctggccacgttcagcacccggcccagcgacgagggcctgctgccgtacggcgcgggccaggtggagcaagcgaaggccgaccgctcgcccgaccagcccgtcaacgtgtcggtgggatggaagacgctgcgctcgagcgcggcgttctggctgctcgtgatcggtttcgtggccatgggcatcacgaacggctgcatcatcacgaactccatcgcgaacatgacgagcgtgacggtgggcggcaccgaggtggtcaccggcgggcactccaccctgtgggccggcagcgtgtggtcgttctacctggccgtggtcattgtggcgaaggtggcgctcggcgccatctacgaccgctggggcatgcgcaccggcacgatcctcggcacgatcacgtcggctctggccggcgtgatgctgctgttcccggcaaccgattggggtcccatcctggcctgcctgttcttcgggttcgccacctgcatgggcacggtggcgccgcccatcatggtggtgaaggagtacggcaagaaggacctgggcacggtcaccggcatcgtcacggcgttcgagctgttgggcgccgcggtgagcgcggtggtgtcgggcgtgatgttcgatgcgttcctgtcgttcgcgccggtgtggatcatggtgatcgcagcaagcgcggtcatgggcgcggcgctgctgtcgtccatccccgcggcgcgccgcctcgtggcgcggcgggtggctgcgggcgcgccccggctggatgcggaaggcttcgagatcgatgccttcgacagctgcttgactaatgtatagtgatacagtaggatttagcgcgacacatagggaacccgccgcgcgcgggcatcggtcggcgcccgcgcggcgcgcgatcggaagacgggaaagcaggcgcatcatgaccgtgtacaaaagcgtatcggagctgatcggcggcacgccgctcgtggagctgacgaactacgagaagaacaacaacctggaagccgtcatcgtgggcaaggtggagtcgttcaatccggccggctccgtcaaagaccgcgtcgcgaaggcgatgatcgacgacgcgctggcgtctggcaagatagacgccgacaccgtgctcatcgagcccacgtcgggcaacaccggcatcggcttggccgccatcgccgctgcacgcggcatgcgcctgatcatcgccatgcccgagacgatgtccgtcgagcgccgcaacctcatgaaggcctacggcgccgagctggtgctcaccgacggcgcgctgggcatgaagggtgccatcgcacgtgccgaagagctggcggccgagattcccaactcgttcatcgtggggcagttcacgaacccggcgaacccggctgtccacgaagccactacgggtcccgagatctgggaggctacgggcggcgacgtggacatcttcgtggcgggcgtgggcacgggcggcacggtgagcggcgcgggcgcgtacctcaagcgcatgaaccccgacgtgcaggtggtggccgtggagccggccgcgtcgccggtgctgtccgagggacgcgcgggcgcgcacaagatccagggcatcggcgcgggcttcgtgcccgacacgctggacaccgcggtgtacgacgaggtgatcgccgtcgccgacgaggacgcgttcgcggtgggtcgcgagctggcggcgaaggagggcctgctcgtgggcatttcgtcgggcgcggccgtggccgccgccactcaactggcgcgccgtcccgagaacaagggcaagaccatcgtcgtcatcctccccgacacgggcgagcgctacctgacgacggcgatgttcggattctaggcgttaaaacgaagtcgaacgagaaggggtctgccgcgtggcagaccccttcgtcatgagatcccgttgtcgctcgaaagccgcgttttgtcgcccgaaagcgaggctttcgagtgacaacgacgttcgattgggtcgaacgtcgccctacttgccttcgatagcgtcgatggcgtcgatcacgcatccgcggaagccgtccttctcgagcgcagccacgcccttgatggtggtgccgcccggcgagcacacggcgtccttcatcgcgccgggatgcgtgccggtttccagatgaagcttggcggtgcccatcatcatctgcgccgcgaggcggtaggcggtggcgcgcggcaggccgtgcttcacgccggcgtcgccgagcgattccaggaacatcgcggcgaacgcggggccgcagccggcgatggagctggccgtggaaagcagcttgccgtcgacccactcgatgagcgcgatccggccgaacaggttctcgaacgcttccagctcctcgtcggtgagcgagtggcgctgctcgcaggcgatcacgcccgcgcccacggcgatgggcgtgttggggatggtgctgaggtggcggctgttcggggcgaggacgccctcgtagaacgcgaagtcgcgcccggcggctaccgagatcacggctttgtcggcaagcagttcgcgcaccggctccaccacctgctcgatgaggtagggcttcaccgccaggacgacgaagtcgctggtctccaccacctcggccgcctcgcggtaggcgttcacgccgagcttctcggccgtggcttgcagtttgtcgaagcgtcccgcgcacgcgtggatgtgctcgcccgagagcgcgcccgagtccacgaggccctgcgccatcgcctgggccatgttgccgaacccgatgaagccgagctcgatgctacttgtggtgtccgccattatgtcctctttccgtcgggcgtgcgttcgccgcgcgatgcttttcatgttggattcgattgtacgccagcggcgccccggcaccaaacgccgatttcgtgacgcgtggttcgggcggtggaacgagcggcctgcgccccatgcgctaagtcggcaggcttcgttcgtgtgcttcacgcgggccttcccgcggcaacgtgcgcccgctacgcagcggcctgttcaacctcgtccgtctcgacggcgtctttgccggccgagcgggcgagaatgttcgcgtacactgcgccggagatgttgtgccacacgctgaacacggcaccgggcaccgcagccagcggcatggctgcgaagtgtaccgtggcgagcgaggtggccaggccggagttctgcatgcccacctcgatggacagcgtgcgcatctgggccttcgacaggcgcagcgcccgcccggtcaggtatcccagcgcgtaaccaagcaggttgtgcagcatcaccacggcgatgacgagcggccccaccgtcagcagcttcgcctggttggcggccaccacggccatgatgatgagcgagatgccgaccaccgacacgagcggcagaacggccgacgcggcccgagccgccttctcgaagaagtagttgatgagaaagcccagcgcgatgggcacgagcaccacctgcacgatggacaggaacatatcgaccacgttcacgtccacggtctggccggcgaacagcagaacgagcagcggcgtgacgataggagccatgatggtggtgcacgcggtcatgcccaccgacagcgccacgtcgcctttcgccagatacgtcatgacgttggagctggtgccgccgggacacgagcctacgaggatcacgcctacggccagctcgggcggcagctggaacaccatcgtcagcaggaacgccagcaccggcatgatgacgaactgcgccaggatgcccacgatgacggctttcggcttcgtgaacaccaccttgaagtcggccagcttgagggtcatgcccatgccgaacatcacgacgcccagcaggatgttcacgtagctggtcttcacgacggcggacacggcgggaaagaccaaggcgataatcgcaacggcgagtgcgatgatcgccatgtactttcccgcgaagtcgctgatcttggcaagcgtcttcacagggaattcctttctcgaaggtgatagggttgggaaagtataccgctattgcgggcggtaggcgagattggtgccgcgcatgtccggaaggcatccggcaggagcagcttatcatagcaacgttttttattgctaatgaaggttagcaataaaaaacgttgcttattcttgaaagcaatatattctgttgctatagtaagagcctctggcaaacagcttccgtgccaaggagggattcatgcagtactatgtggcgctcattgcggacatcaagggatctcgcaagtaccgagcggaagaacgtgggtatttgcaggacctgacaaacgaatcgcttcttttcgccaacgagctcttcaaggagggcatcgagaaggaagttgttttcagcgcaggcgacgaagtccaaggacttttccgagaacctgcgacagctttcctttactatcgctttctatgcttcctgcttggccctggagtgcttcggggcggcttgggcgttgggacgtgggacgtgcgccttgaagaaggagcgtccacaagccaggacggcgaagcctaccattatgcacgctccgctatcctcgaggctcagaagaggaagcgcttcgatcttgttctccgctcggaggaacttccagacgaggtgctgaccacccttatggatcactcactgagcataggcaagatgaggacagcgacccagaacgacatggcgcttgcggtcgagttcttctatccggtgctggccgcttggggttgtgacatgttttcggacaacttgaaaacacgacgcaaaaatctgctagagctccgtatggtcggcgcttcgcgtcgtcgggctggatcggatctgttcaagggcttgctatcgtcccttgacgacggagcggacagcttttgggagccggtgagactcgaggtcggacagcgtgccagttcgtttcactacctcgaaggggatctcgtgggtgcttcgtatgcgctttcccaacgctccggtatgtcgcgtcaggggatcgaccgccttctcgctcagggatgcgtcgccgaagagcgcaacgccgcagccttgttctcttattgctcgatgcgtgagtttaggcggtgagtgctctatgacgctgggattcgctttggtgctcgtgctgacagggcacgtcatcgccgatttctatctacagacgaaccgcgtcgctcgaggcaagggcgaaagcgggaccctgctcgcttcgcattgcgggtactatgcgctgtgcatggcgcttttcgtttccttaacgctcccgctcgatagcatcgttcccgtttggctcgccttgtcgctttcgcatgcgctgatagatttcggcaaggcgcgactcgagaaacgagccggatcatcgcttgtcgttttcgtgatcgatcagacgcttcacatattattgtgcgcagcggtggtcgcggcgttctgcggcggctcgccggcgatcggcgtcgtcggggttcttgccggcgtcatgagtccgccgtccgctgcgacggctttggcgacgggcctggtgctgctgatcatctggcgtccgggggcgattttcgttcgcctcctgctcgaatcggtgaggattgagggtgctgatgcgatgcatgatggcgagagcacggtcgaagagctgcgggcgggacgctggataggcatgctcgagcgaaccatcatctccgtgctcgcgctctgcggccagttcggcgcgatcgccttcgtgttgacggccaagagcatcgctcgtttcaaaatgctcgatgacaaggagttcgccgagtgctacctcgtcggtacccttgcaagcacggcgttggccatcctcgtgtcgttgactatcctggaggtggtcgcatggagctagcggatcccgtcgagcagttgtttttcataagggaaaacggttcggtccctttcggagccgaacctgccgacgtgtacgagttcgaacgagcagggaatcgatgctggatcaggcacaaaaagggggagaaggcctatccgtatggggtgactcgcgtgatggaggagcatccgaaagaaacgcttgatccgtgtcggacggttgtcaggaggggcggcaggtcgttcgacaatgtggaacgcatagcggtttacgacgcccatgtggccgtccgcttctcgaatggcagctgtaaaaggtacagaatcggcgaggtgtccctcgaagagaacatgcttgaggatcctcgtccgaaaaatgtatttgcttatctgcgggccttagcatccactgacgagcttctgaacgagcgtacggaaaggcccattttggaagagcgctacgacggcatcggggcggtcgcgagtggaacggtgctctcatgctacctatcgggtgaatgtcttggatcccagcaggacgatcccgcgccgctcatctatccctttggcctcaatgcgagccagaagaaggccgtcgagcgagctttttccgataggctcagtgttgtgcaggggcctcccggaacggggaagacccagaccattctcaacatcatcgccaacaacataatgcaggacagaaccacggccgtcgtgtcgaacaacgtgtcggccgtagagaacgttgtggacaagttgggccggaacgatttggatttcgtctgcgcgctactggggaggggcgaaaccaaggagaagttcttcgggaaccaaccgacctatccagattctctcgaagcctgggatatggcttcggaggatcgtgaaaggcttctcgccgaggtgggcgagttggtgggcggattgggacgagcttttaaagatcgtgagcgtctcgccgaaatcgacgcatcgatagacgcgtacgaaagagaatacggatacttcaaggcctatgccgagagccttggcacaggaaccgtcgagcagcatgatccgcgcttcggacgggcttctcgaaacatcctgcgtttttgggttagggagggtcagcgcgtcgaggagggtcgttccgttggttttctgtaccgcgcctacatcagggctttcttcggcgggttctaccttgatgcggtcaaacgtgacgacttcctcgtcgtgccattgctgcaagacgcgttctatcgtgcgaagctaagggagttgagggatgaggctcgcctcctcaaggaaaggtcgtacgacttcgaggcgaacatggcgactatcgaggagaagtccatgcgggcgttcaaagcccagcttgcaaaacgttactcggcgaatcgggatcgtaggacgttcgagttgaggggcctctggagcagatcggtggcgttcgcgaaagagtatccggtggtgttgagcacgacgcactcgatcacgacctccctcggtccgtgctttaggtacgacagcgttctcatggacgaagcctcccagattagcgtggcagctggagccttggctcttgcatgcgccaaaaacgcggtcatcgtaggcgaccataagcagctcgccaacgtggtgaagagggagcgtgcagacgaaacggaccgcattgccgacaagcatcgcgtctcagattgctaccgctatgcgaagcacagcatgctcacgtcggttctctgcctttggcctgcattgcagctgactttgctcaaagagcactaccgctgccatcctcagataatcggcttctgcaacaagatgtactacgacggtgatcttgtcatcatgacgaaggacgagggggagcgcgacgtgctctccttccatcgcaccgtgtcggggaaccacgagcgggggcgcaggaacatgcgtcagatctccgtggtgtgcgacgaaatcatacctgacctggtcgattcgggggttcgggatatcggcgtgatagcgccgttcaatcctcaggtgtgcgagttgaagaaagcggttcccgaaggcgtttcggttgcgacggtccacaagttccaagggcgcgagaacgatgccatcgtgctctccaccgtcgaggatgccattggatccttcgtcggcgacccgcaaatggtgaacgttgcggtttcccgtgcggtcaagaaacttcgcgtcgtcgcatcacagaatcttcgaggacgcaaggacaacgatatcgaggagcttgcgcgctatattgagtacaacggattcgagatcgtccaaagccaaatcaggtccgtgttcgacttgctgtacaaggaatacgccgaagagcgtgcgaggtatttgggcaagcgaccgcgcgtttcccgctacgattccgagaacctcatggcggcggctttggaggatatgctcgcaacgggccgttttgcgcaggtgtcgttccggtgccatgtggggttgtccacgctggtaggtgacggggtcgtcctgtcgccgcatgaggagaggtacgtgaggaacccgcgtacgcacgtggatttccttttcttccgcgagatgaacaagcgtcccttgttggccgtcgaggtcgatgcttggcagttccataaggaaggcacgaagcaatacgagcgggatcggatgaaggatgcggttctcgagcggtgcgggcttccgttgctcagactgccaactgacagcaggggaagggagtacgacgtgggcgcaatcgagagaatgttggaacgttgcattgctgagcacgacgaaggatctgaagaggctatctgatatcgaattcgagaaaagcacggtcgtgggataagatgcgctcctcctccaagcggcgaagcggatcgggctgcggctccgaaccgcacctgcatttccacatccagaggggtcaaagtttctatacctcgccgggcgtgccggtgcggttcgcgggtgcgacagccgtccctgcgccgtgctacggggcggccgacccccgcccggttccacctgaggcatacgacgatttcccaccgtttcgcacacgtggtctgaaaggtggaaagcggtgcgtagtcgccgcgttcgcacgcaaccgatctgatgcgccccttcgtcgatcgaaggggtgtcggcattcaacgccttcgtagcctgcgtcggagcgtgcgcacggtacgattcccttgttgcggtactcgccgtttccaaacattttcagctgaacccgcacggatcgatcgtaggattcgttatagaggatagaggaggtgaagcggggcttgaagaacaggctgcgagacggcgaggcgttcgatcgcttggtcgaagagcattacgacgacgtgctggcgtactgccggcggcatgctccgtcctacgacgacgcgccggacgtggcgcaggaggcgttcctgcgtttcgtgcgcagcgggcgctcgccgcgcgacggcaagccgctcgcgtacctgttcaccatcgcgcgcaacctctgcatcgacgccgcgcgggcgcggcggcttcccgtcgggcctctcgacgtagacgtgcccgacggctcgcccgacgccgacccggcgatggcgatcgggggcggcgaggtggatgcgctggttgacgcgctcccccctgagctgcgagacgtggtggagctgcgcttcgaccaggggttcaaagtgggcgagatcgcggacgtgctgggagtgtcgcggttcgcggtgaaccggcggctcaaccgtgcgctcgcggagctgcggcgagggctggaaggaaaggacgaagcatgagcgacgtgggaaagcgggacgtggagcggctgctgcgggcgcactaccgtgccgagcgcggcgcgccggacgagatgtcgaaggcggcggccctcgccgccgtgcgcgcggcggtggcgtcggagcagcggtcgagcgcgagcgcggaggccgcggcgggcgcaaccgtgggcgagcggagccgtgaggcgacgttcgccgggttcgtcgccgctcaggcgcgcttcattcacccgcgcgtatgggtggcccagctcgcgctcgtggccgtcatggcggtcctctgcctcccgtcgagcggcatggcgcacggcatcccggtcgtctcgggcatgctggcggcggcgacggtgctcgtgggcctgcccgagctgctggccagcgctgcgcaccgcgtggccgaactcgagtacgcctgccgcttcgactgccgcgcggtcgcgctggcgcggctgatcgtgctggggtgttcggacgtggtgacggtcaccgccatcgcgctcgcggcgcctgtcatgctcggcgccgatcccttcgcgtcgctcgtgcacgcgtgcgttccctacttcctctcgtgcgcgggcgcgctgctcgtggcgcgccggtgcccctcgtcgcaggcgctggcgctgtcgtgcgcgtgggcgctgctggtgatcgtgggcacgtatgcggcgttctccctcgtccccgatgcgtacgcccaggcgtcgacatgggcatgggcgcttgtggcggcgggctcgctcggctgggccgcgcacgaggtgcgcacgtggattcgcggtatcgagggcggcctcgacgtgttcgcccccgcgtcggctgcccgatgagcccggcgatgccggcgaatcccggaattcgacgactctatgatgacaaggagcatggcatggacctgacgatagaccgcctgaccaagcagttcggatcgaagatcgcggtcgaccgcgtgtcgacccggttgacgcccggcgtgtacggccttctgggggcgaacggcgcgggcaagaccaccctcatgcgcatggtgtgcgacgtgctgcgccccacgtccggcgagatacgcttcgacggccgcgacgtgcacctgctcggcgacgagtaccgcgcccggctgggctacctcccgcaggacttcggctactaccccgacttctcggcactcgacttcatgtgctacctggcggcgctcaaggggctcgatcgccgcgcggcgcgccgccgctcgctcgagctgctggaaacggtgggcctcgccgacgtggcgcggcagaaggtacgcacgttctcaggcggcatgaagcagcggctgggcatagcgcaggccgtgctgaacgacccggcggtgctggtgctcgacgagcccacggccgggctcgatccgaaggagcgcgtgcggttccgcaacctcatcgccagcttcgcgcaagacaagatcgtcatcctgtccacgcacatcgtgtcggacgtcgagtacatcgccgacgagatcctcgttatgcgtgccggctccttcatcatgcagggcgcgccgacggacatcgtcgcgacggtgacgggcaaggtgtgggagtgccatgtggacgcgcgccgcgccgacgagctggcggctgcgagctgcgtgagcaacgtccactacgctgccgacgggcacgcggtggcgcgcgtcgtggccgacgaggctccggtggccggcgcgcgggcgctcgatcccacgctggaagatgtgtacctgtacgtgttccgcgacgaggtggttccgctgtcctgacggacagcggagcgtgccgacgctgcgaagcgtcgatgcactcgatctcgcctctttttcgcttgccctcacgtgcgaagcacgctcggccgcgaaacggggcgatctcgagcacctcgacgcttctcgctgacttttattcaactggtgagagaaggaatataccatgcttgatctggtgagattcgaactcaagaagctgctcgtgcgccgcacgtcgctcatcgcctgcgcaggcatcctcgtgatgctgtgcgggatcatgacgctcaacatcgtgcagacgaagacggcgtccgacacgggcgaggtgctgaacggcaccgccgccatcgcgcaccagaaggagaaggctgccgcgcacgagggcgtgttgacggtcgagcgcgtgcaggacgaggtggtcgcctaccaggcgctcgcgttctcgaaagtggatcccgccgacgtggccggattgagcgacgaagcggcgtatgcgctcatgattcaggcgtacgacgaagacgagttccgcgcgatctacgactcctactatgcctacctgctttcgccgtggaaggtgggcgccctcgagccgtaccaggtggcggcgcagcttgacgacggcgccgccgacgggttctacgaagccgtcgcgggcaagctacagcgcacgctcgacaacgacatgggcggtacgtggacgtattccgatgccgagcgcgcgtactggacggagaagcagggcggggtaggcgagcctttggcctacgggtacgcgggcggatggagcgacgtgctggcatgcctcgggttcttcgccttcgcgatggtggccgtctgcatcgcgctcacgcccgcgttctcgggagagtaccaagaccgcaccgacgccgtgctgctctcgtcgcgctacggtcgctcgaagctggtggcggcgaagatcgtcgcggcgctcgcgttcgccacggcctacttcgcgctggcgacgctcatcatcatgggcgcggcgctcgcgttcttcggtgccgagggcggggatctgccggtgcaggtgctgtcgctgtccatcccgtacgacctcacgatggccgaggcgacctggacggcggtggggatagcctacctcatgacgctggggttggcgggtctcacgctgctgttgtcgtcgaagctgcgctcccagctggccatcttcgccgcctgtgcggcgctcatcttccttacgggcatgatcccctccggcggcaacgccgtgctgctgcacgcgctgtacctgtttccgatcaacggcttgaacgatcaggtgctgttcgactcgctcgtatcgtatccggtcgggtcgttcgtcatcgacctcataggtctgctcgcgtgcgtctacgccctcgtgctggcggcgtgcgtgcccctggccgcccgcgcgttcaggcggcaccaggtggtgtgagcgagaatgcggggcgccctgcgcgaagggtgccccgcgatgggagagcttgcaggtcttcgaagaggtcggcggttgaaacaagaagcaggtcgttgcgcgatgcgcatttcttcttcgtcgcgtcgctgacggggtttttggtgaacaatgcaaacgagtgctggtcgtatccttttacgagcggggctcgagcttcgagtttgcgcagcgcctcggtctcgtcgagagattccctccatttgcactcgccgagcagtatgcgtttcgacggcttgtcggcagcgatgacgtcgatgtcggtctgttcgtgcgcgacggggtcggtgccccaccatcgtccgaacgaggaggctaaaaacggcaggtttccctggcggttgcgacgaatgagccattgcatgcaaatgtcttcgaaccgtttgccaacgtacgtcgagaatgcctcgccgaaagccgtcccccgtgcggctgcgtttccggctccgctttcaatagcccctatgctgcggctcacgaaccgataccagtaggcaaaaaaaggatcgcgcacggagtacagcccttttcgagacttttcagggttgtcgccgaacgggatggttcgctcgatcaagccgagcccttcgagcgtcttgaggtacttcccgatggagccctgctcgacaccggccttttcggctatctctttgggaaaggtggcgccgttcgccacggcgctcagtatcgagttgtagtttgcgggttcgcgtagttcttggcgcaggagcatcatgggctcttcgtagagaagcccggctttgttgaagaataagaactcgatgttttcctcgaacgaggcgttcgagtctatttgggcaaggtagtaaggcgtgcctccgaaggccgtatagtagcggatgcgttcttcgtcggatgttgcgggaatcatgcgagctgcgtccaagtaatcgaacggttgaagcttgatttgcgaggtgcgtcgtccgtacagagggctttttcgtcccagaacctcgctttccatgaacccttcgttgcttccgctgaggattatgcggatatcggtgttcttgaattcgtggtcgatggctatttgcagcgaggagggcagggagggttcagactcggcggcgtacggaaactcgtcaaagacgaagaggatcggctcggatgaggatttcgcgcggctagcaacaaaagcgaaggcatccgaccatgattcgaatgctcccgtcgtggcgggcaagtcgaagaaccggtaggccgtttgggaaaaggaccgcaggttcatggtagcgctttgaacctgggcggtgaagtacagggtaggctttccttcggagaacttgtcgagcagcgtcgttttgccgacgcgccgccgcccgtagagcacgaccatctggaagccgctttttcggtacaggcgctccagcgcgccgagctcttcttcgcgaccgacgaacatgcgtcctcctttgcatcgcaactgacttacgagcatcttactcgtaagtcagttgcgatgcaaccgctatgcgcactggcaagaccgcgtcgatatgcgagcttttctaggcgctgttaaggtggcatcggctctggtatttgcatcatgcctggtggcgagattatggtcaggcatgatgcttgttcgaagatagccataacggtgcgatcttgccgaaatcgcacggcatcgttcgccctgcggcgtcgtgcgatccttcacgcatcggccgagtcctatgccttttccagttgctggtccagcagcttctccagcgttctccaggccagctcggcgcatttgacgcgggcgggcatgcgggcgatggattcgagctcggcggcttcgtcgaggtcggcgcgctcctcgtcggtgagcgggcgtcccttgatcatgtcgaggtagaggccgcttaagcggcgcgcttcgcccacggtctcgccggtgacgaggtcggccatcatgtcggccgccgcctggctcacggcgcagccgtggccggtgaaggcggcctcctctatacgatcgcctctcaggcgcagcgacagcgtcagctcgtcgccgcagctggggttcacgccgtcgtgcgtgcaggtgggctcgtccatctggtacttgtagtcgggatgcgcgttgtgctccatgagcgccgcggtgtagatgctagccattgaaggtcctccaaacgccgtccaggccgtcgacgagcgcgtcgatgtcgccctcgtcgttgtagaacgccagcgacgcgcggcagcacgactccacgccctgccacgccagcagcggctgggcgcaatggtgcccggcgcggatggccacgtcgtgctcgtcgaggatgctggccacgtcgtgcgggtggatgccgtccacctcgaagctgatggcgccgtggtgctgcgccgggtcggggtggccgatgatgcggatgtagggcagcgccgccagacgttccatggcggcgcgcacgagcgcttgctcgcgcgcctgcaacgcgtcccagccgatgccctcgaggtagcccagcgcggcggccgtcgccacgatgccggcggcgtcctgcgtgccggcctcgaacttctcgggcacgggcgcccacacggccccttcctgcgtgaccgacgagatcatctcgccgcccgtgaggaacggcggcatggcctccagcaggtcgagcttgccccacagcacgcccacgccgaagggccccagcgccttgtgcgctgagaacgcgaagaagtcacagccgagcttccgcacgtcgacgggcaggtgcggcaccgattgcgcgccgtcaaccaccatgaagccgtcgtgcgcatgcacgcgctcggccatggcctcgatggggttctcgatgccgaggacgttcgacacgtgggcggccgcgacgatcttggtgcgcggtccgatcttcgcgtccagctcctcctcgccgattacgccgtcctcgtcggggaacaggtacacgaggcgcgcgcccgccgcgcggcacgcctgctgccaggggatgaggttcgagtggtgctccatgatggtgatgcatacctcgtcgccgggctccagcacggtgggagcgaacgctttcgccacgaggttcagggcctcgctggcgttgcggcagaacacgacctcgcgcgcatcggcggcgccgatgaagcgcgcgacgtgggcgcgggcctcgtcgatggcctcggtggcgtccaccgacaggcgataaaggccgcgcagggcgttcgcgttcatcttctcgtagaagcggcgctgcgcgtcgagggcgacggcagggcgctgggccgtggctgcgctgtcgaggaaggcgaggccggggttggccgccagcagggggaagtcctgcttgtaggggttcgcggctatgtcgattgcgagggggttgctttcggggacgctcccggggacgcccgggtcggccgttcgcgtgcggcgttgctcccggacgtcgccttccggccatgtggttggggtgctcatgcgacggcctcctcgatctcgatgccgcgggcggcggcgaggcgggctacggatgcgagggtgcgctggtcgggcgcgttgatggccgcttcctcgaaggaggcggtgatgaacaggcgctcggcgtcgtccggcgagataccgcggctggccaggtagaacagctgctcgggacgcacatggccgatggtggcgccgtggttgccggccacgtcgtcctcgtcgcagaggatgacgggcacggtgcggttcgccacgcgctcgtcggcaagcagcaccgtctcctgctcggagccgacggaacccttgcagccgtgcacgagctcgatggtgccgcgcagcgtcttctccgattcgcccgccagcacgccgttcgcgtcgaggttgcacacggtgcgccgtcctcgctggtgcgcgacgtagttgaagtcgcgctgctgggaggcatgccccaggtagcgcgtgtcgatgtcgaggcgcgcgtcgtcgccgcgcaggtcggcgtcgagccccgtgtacgcgcggcccgcgcccagcacggtgtggcgcacctgcacgagggcgcgctcgtcgagcacgatgcccgcatcgtcgagcgcgatccatccgtcgtcgagcgtctgcgtgacggcgacgtccacccgcgcatcggcgccggcgaacacgcgcagtcgcacgcccacgacgcccgcgcccggcgcgggcgaatcgagcgcgacggccagcgacagcgacgagcccggagcggccacgacgtcgacggcggccgcgttggccgcgccgtccacgccttcgacgcgcactgttgcgcaggtgcgctcgtcagggcgcgtggccagcacgacaggctcgcccgccacgaactcgaggtattcgcgcgcttcgtcgcccatgccggtggtgaagacgtcggcaggggagaggtagcggttctcgagcgcctgaagctggtaggctgagagcgcgggagcgtcgagcccctccatggcagcaccctcctctgaggcggctccgccctccgcggccgtcccatcctccatggctgcagggagagtcgattggtcgtcaatctgatgcgcagccgccccgccttccatggctgcagcgagggttgcttggtcgtcgacctggtgtgcagccgatgtcggggcgcttgcgggttcgaccggggagggctcatgatcggccgcgcatgcggcgggttgatcccgaagcccctgcgcggccatgaaggggtggaggcagtctgcggccacggaaaggctggagagcgcgcgatcgaacgccccaacctctccctgcagcccttcctcgcacgacacttccacctgctgggcggctgcaaggccgctcggcagctctatgtccacgtcgttgacgtgcaggcgatgccaggtgggggcgggcatcgcgttcgcgtgttctatcgtgagggttcccattatccgatggccccttccatttctagcttgatcaggttgttcatctccacggcgtactccagcggcagttccttcgacacggggtcggcgaagccgttcacgatcatcgtgcgcgcctcttcctccgacacgccgcggctcatcaggtagaacaccttatcgtcgccgatgcgcccgatggtggcctcgtggccgatgtccacgtgcttgcagcggatgtccatggccgggatggtgtccgaccggctgatgtcgtccagcataagcgactggcacgacacgctggcggccgcgccccgcgcgttctcggtggccacgatggacgagcggaacgtggaggcgccgccgcccttcgagatggacttcgtctccacggtggccgacgtgtcgggcgcggccagcaccaccttgcagccggtgtcgaggttctgccctgcgccggcgaacgtgatgccggtgaagctgctggtcgacttgcgcccggccaggatggacatggggtagaggtagcccacgtggctgccgaacgacccgctgatccactcgacggcgccgccctcctgcaccacggcgcgcttcgtgttgaggttgtacatgttcttcgaccagttctcgatcgtggaatagcgcaaggacgcgcgcttgcccacgaacagctccacggctccggcgtgcaggttcgccacgttgtacttcggcgccgaacagccttcgatgaagtgcaggctggcgtcgtcctccacgatgatcagcgtgtgctcgaactgtcctgcgcccttcgcgttcaggcggaagtagctttgcagggggaagtccagcttcacgcccttcggcacgtagacgaacgagccgccgctccacaccgcgccgtgaagcgcggcgaacttgtggtcggtgggcgggatcagcgtcatgaacttctctcggatgagcgcctcccacttcggctcgcgcagcgcctcctcgatgccggaatagacgatccccatgtcggcagccgttttctgcatgttgtggtacaccagctcggagtcgtactgcgcgccgacgccggccaggtaggcgcgctcggcctcagggatgcccagccggtcgaacgtgttcttcacatcgtcggggaggctttcccaatcggcctgctggtcggtggcgggcttcacgtacgtcacgatgtgatccatgtcgaggccttcgaggccggggccccagtcgggcgcctccatgcgctggtaggtgtcgagcgccttgaggcggaagtcgagcatccaggacggctcgcccttcttgaccgagatctcgcggacgatgtcgggcgtgaggcctgcgtcgagacggagggatgggtcggtcgcgtcgctgatgtcgtacagcgtgcggtcgacgtcctccacataggttcggaactctttagtcatgcgtgcctcctagagcgcggcgacgggctcgcgcgccgcttccgcaccggcttgctcgaactgctcgaagccctgctcgttgatcgattcgatgagcgaggagtcgccctcggccaccatgcggccgcgcaccatgacgtgcacgcggtcgacgtcgaggtgctcgaggatgcgcgtgttgtgggtgatgacgaccagcgcgccgcccgtggcgcgacggtacgcgtcgatgccgcgcgacaccacgcccagcgcgtccacgtcgaggcccgagtccgtctcgtcgaggatggcaagcttcggttccagcaatagcagctgcagcatctccagcttcttcttctcgccgcccgagaagcccacgcccagctcgcggtcgagatacgacggatccatgtccagctcgtcggccagggcgcgcacgtgcttcttgaactgcttgcccttgagctccttgccgtcgcggccggcgacggttgcgcgcaggaagcttgacaggggcacaccggggatttcgacgggcgcctggaagctcaggaacagccccgcgcgcgagcgcttgtcgggggagaggtcggtgatgtcgcggccgtcgaactcgacggagccgccgtccacgcggtaggcggcatctcccatgaccacgtggccgagcgtggacttgcccgcgccgttcgggcccatgatgacgtgggtctcgccggggcccacggccagatcgatatcgtgcaggatgggggtttcgtcaaccgaggcggaaagcccgcggatggtgaggagcgaatcgcgcttcgtgatcgtcatgtgcggtgcctttcattaatcatatagttttgctaggattaagatagtggcaaacgggatattgtcaagacttaatcatacaagtttgctagaatttacggaaagcggtcggcggccttccggtgcgaacgactgcttcacgcgatacgttcgcatggagggacgcgggactgccgcgcgagatcgccatcgtgtgcggcgcgaaacggaaaggaagggtgatcgagatgctcgtatcgacgaagggccgttatgcgctgcggctcatggtgtgcgtggcgcaagcgggagcggagggcaaggttgccctgcgcgaggtgtcggagcgcgaggacatctcgctcaagtacctcgagcagctggctcgtccgctcgtgcaggcagggttgcttcgcagcgtgcgcggcaagggcggcggctacgcgctggcacaggagccggccgctatcagggcgggcgacgtgctgcgcgcggtggaaggctccacggccccggtggcgtgccttgatttgcaagaggggatggcctgcccgcgagcgggcgaatgcactaccgtgcgtttctgggccggcctcgacgaggtcatcgagcgctacgtcgacggcgtcacgcttgccgatctggccggggaacccggcttgccgtcccttcctgcaatctaacgcgggtatgacgaggctctaacgggttagatcacgatgacttttccgcttcggaaggccgatacgcgagccatacaatgaccggacagcgtatcgggttccaccgaaggagttgcatgaaacgggttatcgtgatcggtgccggcgttgccggtttggcggcggctgcgcgcttgcagcatgccggatacgaggtgacgctcttcgagaaggagccgcttgtgggcggcaagatgaaccagatccgcgaggaagggttcacgttcgacgtgggtcccaccatcgtcatgatgcccgagctgtaccgcgaggtgttcgaaacgtgcggccgcaatgccgacgactacatccccatggagaaggtcgaaccgctcatggacatctccttcggccccggcgaccgtctgcgcttatcgaacgatctcgcctctatgaccgccgccgtggaggccgtcggggagaaagacgcgcagggttacttcgagtacctggcgctgctgtacaagcgctacctcatcgcgaaggacaacttcctgcaacgctcgtttcgcaaaccgatcgatttctacaacccgaaaagcttggtagccggtctgcgcttgcacacgctcggcgacgcgtactcgtcggtcgcgcatcatgtgaaggacgaccggctgcgcaaggcgctcgcgttccaaacgctctatatcggcatctcgccgttcgaaggcccctcgctgtacatgatcatccctatgatcgagctgctgtacggcgtgtggttcatgaagggcggcatgtacgcgatggcgcaggctatgggccggctgttcctcgagcaaggcggcgagctgcgcacgtccacgccggtggagcgcatcgtggtggagaacggctgcgcctgcggcgtcgaggcgggaggcgcggtgcattacgccgactacgtggtgtgcgacgccgacttcccgtacgccatcacccagctcgtcgacgaggccgacgcgcgcggcaagtacacgccgcagaagatcgaggagatggagtactcttgctcgtgcttcatcctgtacctgggcctggacaagcgttatccctccgatgcggtgcattccatccgcttcgcctccgacttcgagcgcaacatcgacgacatcttcgacgacgcgcgctttcccgacgatccgtcgttctactgctacgcgccttcgtcgctggaccgctcgcttgcgcctgagggctgttcgaccttgtacgtgctggtgccggtcccgccgctgtcgcccgcatcgccccgctggtcggacgcggaggtggccgagtatcgcgaccgggtgctcgacctcatggagcgcgagacggtgtacgaggacgtgcgcgaccatatcgtgttcgagcgcgcctacacgccgctcgatttcgccgagcggttcaacgcctacgacggcgcgacgttcggcttgcggccgacgctcgggcagagcaactactggcggccgcacaacaaggcgaccgactgcagccgcctgtacttctgcggcagcagcgtccatccgggcgcgggcgtgcccatcgtgctgctcagcgcgaagctggcggcagaggagctgatgcgcgatgaccgcctgtagcctctttgaagagcgcgcggacgatttcgcgtggtgcgaggacgtgatcaggcgcaactcgcatagcttctaccgagcgttctcgctgctgcccgcttgcaagcgccagcgcgtgtacgcgctgtacgcgttctgccgcttggccgacgactgcgtcgaccgcgacgccagcgcggcgaagctcgagcaggtgcaggacgaccttgcgcggttcttcgcaggcaccgtggtcgacgctccgttgtggcgcgcgctcgacgcggtatgctcgtcgttcgacctggacgcgcagcccttcttcgacatgctggaaggacagcgtcgcgacctgtcgttccgtcagccggaaacgatgggcgacctggaggaatacggctactacgtggccgggtcggtggggctcatgctgctgcccatcctgcacgccgcttctccggtggacgacggtttgcgcgacagcgcggtggcgctgggcgtggccatgcagctgaccaacatcctgcgcgacgtgggcgaggacttggagaacgggcgcgtctacctgcccgcggaggtgctggaggcggcgtcgtacgcgccggagcgcctgcgcgcgcacgcggtggacgaggcgttccgcaacgcttgggagacggtggcgcaccgctcggaggagttgtaccgccccatggagcgcgacgtgatcgagctggacgacgacagccggcttcccacgctgtcgtcgctgtacctgtaccgcggcatcttggacgaggtgcgcgccgacggctaccgttgcttcgagcatcgcgccgtcgtgtcaaaggcaacggcgcgcgagttggtggacgaagcgctggcggcgctcgaggaagggaagcgatgatgggcgacgtgatggagaacctgatcggcttgggcgtctcgctcgcgtacgtgctggcggtgctgggagcgtccagcctggccgcgcggcgtggcgcgtcgtcggaggcaacccgcaagttcgtgcatatcgcgttgggcggctggtggctcatcgcgacccggttcttcgattcgcctctgtgggcggcggcgcttcctgctgcgttcatccttgtgaacgcgtttgcgtaccgtcggcagaagctgtcgttcatgggacgcgacggcggcgaggacacgccgggcacggtgtactacgcggtgtcgctgacggcgctcgcgctgttctcgttcggcatcggcgcgtcgtacgtgggcgcgctcggcttcttctgcatggcgttcggcgacgggttcgcagctgtgctgggcaagcggttcggacggcgcgtgctggtgggatgctgcgggaagacgctggtgggaagcgcgaccatgctggcggtgagcttcgcttcctgcgccgtcgtgctgatggcgccgccgcctttcggtgcgggcggcatcctgggcgcgccgggcggcgcgttcgccccgctgggctcgctcgcggcgtcgcttctggccgcggccctgctggccgcggtcgccgctgccatcgaggcgttctcggtggaggggctcgacaacctgttcgtgccgctgggcgtgtcggcgctgtacgcggtgctgttcctgcccgcagccgcctacacgcccgcgctcgcgggattgctgctgtcgggcgcggtggcgctcgcgtcgtttcggctgcggctgctcaccgtggccggcggcctcggcgccgtggcggtgggcacgctcgcgttcgctatcggcgggtggccgctgtggctgctgctcatgtggttcttcggcaactcgaacgtcgcgtcgaagctgatggcgcgttcggcggtcaagcggaacggcggggcgaccgcttcgcgtaagcacagcggcccgcgtgcgttgcggcaggtgctggcgaacagcgtgccgttcctcgcgtgcgcgctggcgtatacggcgacgggggagccgtggctgctgcttctggcgtccggcgctctggcggccagcacggccgacacgtgggcgtcggaggtgggcgtgtacagccgccggccgccggtgaacatcctcacgcgcgagcccatgcagcgcgggctttcgggcggcgtgagcccgttgggtctcgcggccaccgtggtgggagccgtaacctcggcgtttctggccatgctgctgttccatgcgttcggctacgcgattcccaccgggcccgacgcgttcttcttcatcatcgcgtgcggcgtcgtgggctcgctcgtggacagcgtgctgggcgtggtcatgcaagcgaagtaccgctgtccgaacgacgctgagggagggcttgtggaaacgccgccgtgcggggcccaggccgcgctcgtgtccggctacgcctgggtcacgaacgatgccgtcaacctcatgagcggcatcgccgtcgtgctgctcggcctgctcgtagtggtgtaggcgggcgctggcggtccgagggcgggtggatttcgtcgggtggcttccgacgatctgggcgcgaaacggcacccatgacgatgtgcgagcgcattcggcggcggcatcgcttcgatgacgcgcaaaggcccaggtggtgaaaatctcccggatgcttcgtcgtccgtttgcctcctcgagattgtcatgggtgccgtttcgcgcccgggagttcggcgcgggatggttggacgttctgtggcttgccggtaacggttggatggagtgcgcacgagcttcataatcctcgggtatgttcaggaagagagggccggcgcagggccggcgtgagaacgacgcgaggaggataggcgatggcgcaggaggcgaacagcagaaagggaaagttgggcgggcttttcgacgacctttcgatagcccaggtcgttgcgggtgcgcttgctgcggttacgtccatgctgctagcctcgcaaatcggaatctacggttcggcgatcggcgtgggcgtgggctcggtggtgtcggccgtggcatcgcagctgtacaagaagttcctgcagcgctcagccgacaagctcaaggagatccatccgggcgagacgctggcgatgggctcgaagggttcggcgggatcgaaggacggcgcgagtgcaggcggaggcgcgggtgccgcagtcggcgcggggtcggtcgcgggctcgcacgctgcggcgaccgcgaagctcgatgctgccgagacgacggcgctcccgaaagaagccgcgcgcggccgggcgccgcatgcggacacctcgctcgccggcggcacggtggtgcagcgggcgcgcgccgagcgccagcgcaagaagaagttcaagcgcggcgtggtgatcgtgtccatcgtgtcggcgctgctggcggtggcggtatccgccttcgtcatcgacttcgtgtcggccggccagggcgtgggcgcgaaaaccgagcctatcctgccgtcgcgcagccagccggtcgacgactccccggcggcttccaacggcaaggacgcttcgacgggatcttcctcgtccgaggaaagcgacgcgtccaaggacggcgcgaaggatcaaggcgagagccagtcggacggcaagggatcgtcggggtcgggctccggctcgggaaccgattccgggtcgaattccgggtcgtcgtcgggcgaccggggatcgtcgaactcgggatccggctcggggtcgacggactcgagcggctcttccggatcgaacggctcttccggatcgaacggctcgtcgggcggcggcagcggttcgggcggcgggagcggcaacctgtcggattcgggcgacggatcgagcggcagttccggcagcggctccggcagcacgggcgcgccgacgggctccagcggtgcggccggctcgaccgcgggttcggggacggccggctctgccggagcggcgcagctggcggcgaatccgcctgcggcttccgtcgcgtcctgacgtcgcgacgcggggtatactgagcggcatgacttcaaccgcctacagctccgatgccgcgctcgacgagggaggctgcttgcgcgtccgcttcgctaaggacgcactgcgcccgcacgctcggttctcgcaggatgcggggtagcgcgtggaattcggcatcaccatacccatgcagcgccatgtgggcctgccgcgcccgccgtacggcgaggtggacgacctgctgttctgctgggaggcgcaccgcatagccctgggaggttgcgatatgctgctgctggcgaacgcgagcaaccgcttcgccgcgttcgcgtgcatgcagctcggggagtggcgcgactgggagcgctcggcggtgttggcgctgcgcgcgtcgctggcggcatgcggcttcgccgagggttcgatcgacgcgtacctgttcttcggcgggattccggtcgtgacgcgcacgcacggccggcgccccgtggcgttcatgaacgtgctggtggacaagctgctgccgctggcgcttccccttccgtccgacgagggcgagccgttcccgcacgagctgtgccgcctcgccaacgagcatatggcgtgcaaggcggccggcttcgagggtatcggccggccggccgagcgcttcgcggccgacctcgcgcgtctgggaatcgggcgggcgcggtaggcgttccgtgctgccgcgcatcttcgccctaaaaacacgccacagcgcgtgaggcgtgttttcgtagcgatgatgatgcgtcgacgcgcatcgcagacgccatgtcgccgcgaccgccgtcgcgttcgaaacggacggtccggactcgaaaaccgaccgcttcgggcgacaatgcagcgggcttctcgcgcggccgatccggcggccgtgataccatggtcgccgacagaaaggacgcgcatgacggcaaccggcgacaccgccacctcgaaactggaactgatcatgggacgcgacggcctggcgcgcctcgcggattccaccgtcatggtgctgggcgtgggcggcgtgggctcgaactgcgtcgaggcgctggcgcgcggcggcgtggggcggctcatcgtggtggaccacgacgtggtgcaggccagcaacatcaaccgccaggccatcgcgtttcgcagcaccatcggccgtaagaaggtggacgtggcgcgcgcgatgatcgccgacatcaaccccgaggcgcaggtggaggcgctcgaccggttcgtgctggccgaggacgtgcccgaattcctggacgcctacgccgacagggtggactacgtggtggacgccatcgacacgatctcggcgaagctggccgtcgcgcagtacgccgatgcgcacggcgtgcgcctcgtcagcagcatgggagcggccaacaagctgcggcccgaagctttccggttcgccgacgtgttcgacacggtgaactgcccgctgtgccgcatcatgcgcaaggaggcgcgcaaacgcggcatccgccgcctgcgcgtgctgtactcgtgcgagcagcccgtgccggtgcccgtgcgcgagggtgcggagcgccgcgagcggtcgaacctgggcaccgcctcgttcgtgccgcccatcatgggccagatgatagccggcgaggtgctgtgcgcgctcgcaggcgttggcgcgcatgcgggggaggagcacgcatgacgtcggaagcgcctcgcctcggacacgcgcatcctccggcagatcgccccgagcccgcggcgtacccgaccgaaccttccgagcctgtgcagcgcccgtcttgtcatcctgggcgcagcgcgcaacgcggagtcgaaagatctcgagcggcgtcagccagtgcgctgttcgacctgcactgccacctggacttcgatcccgacacgcgggcggctgcccaggtgctggccgagctcggcatgggcgcgttctcgacgacggtgacgccggagggctacgagcgggcgcgcgagctgctggagccgttcggcaacgtgcgcgtggggctgggcctgcacccgtggtggatcgccgatggtcgcttggacccgcaggacgtggcgctgttcgagaggttggcgaaggacgagcgcttcatcggggaagtcggcctcgacttcggccgcgatcgcaccgcgacgcgcgatgtgcaggtcgcggcgttcgagcgcgtggcgcgggcgtgcgcaggcggcggcaaggtgctgtcgatccacgccgtgaaggctgcgggcgaggcgctcgacgtgctggagcgcgcgggcgcgctggtaggaaacgcctgcatcttccattggttctcgggcacgtccgatgagctgcagcgcgccgtccgcgccggctgcttcttctcgatcaacccgcgcatgctggcgtcgaagcgcggccgtgcctacgcccaggccgtcccggccgagcgcctgctgctggaaaccgacgccccgtcccagccgggcgagcgctacgatgcgcccgccgaagccgctcggctcgccgccatgctcgaagccctcgccgacctacgtcgcacgccccgcgacgatcttgccgcccgtatcgctcggaccagccggcagcttttcgccgccgcctgacgcgctcttcgtcagccggcgacttcttcaagcacgcgcatccgctcgcccatgtcttcgcgcatgtcccaggctgcgtacggcaaggcttcgaatgcaggagcggtttcacctgcgatttcgatggcgctgggtacactgctcgcgagttcggcgcagatgtgcgcgatgtccttgcgatccacgccgatcgcggagccgaattccaaaatgctgctaggcgagacgtcgtcgatgaccgatgccgatccgatcctcatccccatcgatcgcgagaaccgttcgaatcgagttgtcgaaacgaggtcgtacgcaggcgcaagccggaagctcttccaggtgctcgtgtacaggatcgacaggttcttcaagtgattgtcgcagttgcctacgaggtagttgaagcacgtgatccgcgcaaacgcttccagatcctcgatagggcgagaggatcgcatccggatgaacgagccgaccgctgcggcggtggagggctcgagctcgcggtatttcgcttcgggcggcaccccgaacgcttgtgagaggtcttcctgatgaagccttgaaacgactggctctcctcggtctcgaagttgccgtcggtcgtagcgttcgacgcatagtaccggcctcccgaagtcgagcagatgcactggtgcgacggcgatcccgcatgcggccgccgctttcatgcacaggtactcgagcagcgggatgtcgggaagcgatcccgttttgaggatatgggtcgaagcggcaccgtccaaaggttggagccagccttcatccatgggcgcgcccggcatatgcgcgagccccgctttcccttgcgtgccggcaagggaaagccgcgcttcggaattcgattcggcaagctcttccatggccgagaacagggcgcgaagatcgaagccgctcaaacggcggtacgaacctcgcggattcggcgcctccccgttcgtgatcgcgacgtcccctatggtttccagcccgcatcggagcaacaacagcaggtagttgtcgggctcgatgccgagctgcgccgcgatcgcccgccgtgccgcaccttcgggcaagaggccgtcgaagtagggagcgagcgtcgattcgctataggcctcgtttcgcagagggagcgagcaggagaccgctcgcgcgtcggggtcggcgaggtagccgggatcgtaggagaacgtgacgggatcgaggttgatgcgtccgagtaggcgcggttcggaaccgtccattctgaataccgagagcgcatccatcaggcatccctcgaatcggcgctcagatccatgccgagcgtttggaggacgcgcagggtcttccccagctcggaggtttccttgccattttccaggttcgacacgaaattgattccgacgccggagaagcgcgcgagcttcgattgggtgtatcccttgcgcttccgctcctcccgaacgatgcgccccagctcttgcgctgtcgcgtatgttgtcataaaaacctcgattcatgcgtacgagggaatacccaccctgttgctagtttttcattcgtacgcatgaattctagcatattgcaaggaattcatgcgtacgaatgaattcctgagccagagcacagaaaaagtacgcgcccgggcctccgaagaggcccgcgcatgcggagggagggaaggaaggaagggaaaggcgttctatttcttcgcgatgagctcgcgggcggcgatgcggccgaacaccatgcattcggtgatgttaccgctgccctggtacttcgcggcccagatggatccgaactcgcccgacgagtacaggttggggatgggctcgccgtccacgtcgaggatctgcgccttctcgttgcggcgcgggccgccgtcggtgttgaggatctcggggatgcaggggatggcgtagaacggcggggtgctgacgggggccagctggtcggaggggcggtggaactgctcgtccacgccgttctcgcacgaggcgttccacacgttcacggtgttcaccagctcgtcgacgggcacctccatgagcgcggccagctcctcgatggtgtcggccgtgagcgcgtagccgtcggccactgcgtcgatggcggggtcgatctcggttttctcggtttggttctgcaacgtgttgttggccacgtccttgcccatataggcgccgtatcgcttaccctcggaatcgtacacgaaccactgcttgtcgggcagggggagcatcttccactcgccgccgaagttctggtggccgtggcggtagccgtagtgcagcgacagcgggccttcctcgcccttcgtgaacatggtggtgccttcccattcctggtagaagcggcgcccgttgacgcccaccacgatgccgagcgccttcttgaggctgcggtacggcatggtcttctcgccgtccaggctgatgccgttcgaccaggcgcccgcgaagctgttcatgtgccacatcccggcgcccagcttcgcgcagatgcgatggccgtcgccggtgttggtagaggcgcccgccgcgtgcatgcgctcgaacgacaggtagtcctgcagcatctcggggtcgttctcgaagccgccgcaggtcatgacaacgcccttgcgcgccttcgcgtagacgctcttgttcttgtcctcgtacaccgcgccgatcatggccttcgtctcgggatcctgcacgagcgcggtcagcggcgcgctggtcttgcgcgtcacctggtcggggtactgctccagaaccgcgctcaggaacttgctgatgtgcgtgcggtcctcgtcggcgttgtccttcttgaactggcacttcgagaacgatccggaattctccagctcgaaccattcggccttgccgtcgccctgcggcgtgatcttgacgtcgtcttccttcatgcccaggccgctcagccattcccagttctcggcggcgccctgcgcatacgtctcgtagacggacgccggcgtggcggtcatgccgcccagcatggctttcatgtacacggcgaacgcgtcgggctcgtcggtgatatggaacgacccgctgcacaccggcgagttgccgctgccgatgagggtggagcctttctccagcagcagcgtggaaaggtcgccgccctcggtcgccatcgcgacggccgtggccaggcctgcggcgcccgcgccgacgacgatgacgtcgtactcctcgtcccatgcgatatcggcgacggacgtggcggcatcgttcgcggcattttgcgccggcttcgggccgcaccccgccaggccgagcgccgcggcgcccaacgcggccatgccgctcgccttgatgaagttgcggcgcgagagcgcgtctttcttgtccatgtctcctccttggttacggtgcttcccggcgagagccccgtgcttcccgccgtgttgaatctgcctgctcaccatacgacgatccacgtgccagcgatgagacccggataggagcaaaggcctggtgagcgtgtcgcccgaatcgggcgaacttgattgcgcgctcggttggggagggacgggagcgccgttccgtgcgataatgcggcacgggggaggaggattatggaaacgaaggaagacaagcgggaacgtaaggaggcatccgggggattgcgggcgggcaccgtgtccatggcggtggggttcttcgtgtggtacacgtgctccaactgggtgagcgcgctgacgtacgatgcctcgttctcgtactggtggctgaacaaatcgggcgccgtggtgctggtcacgctcgtcgcatgcgcgatcctgtggcgcgtccccgtgccggcgcgcgttgcgaagagtctcgattggacgttcgcgggcgtgtacgcatgctcgttcgtcgtgctgctcggaggggcaggcatggcggagccgattggagacctgctcggcctgctgctgtttgcggcagcgcaaacctggatggtcgttcgctgggggtcgtactacgctcgctcgtccaccgacgacgtggcacgcgcgttgctgctggccatcgtgctggtggccgccgtgaagtgcgtgacgacgtttcttccggaagcagcgacgatggcgctcatgcttgcgcttccgttcctgtcgatgggggtgctcgcggttcgtttgctcgacgaggccgacgagcgtcccgccgagcagtggttcacgcgcgcgtcgcttccctcgttcgggcgtatcgtggcggcgatggcggtgttcttcttcatctggtccatcctcaacatgacgttgaagcacggcaccggccactacagcttcggcatggccgccacgccgctgtacacgctgctgtcgcaggccatcctcttcgtgttctgcgcgttcgtgtactggtgggtgttcaggcgccggcggcatctcgacatcaccgtggtgtggcgcttcacgtacgtgctgatggcggtggcgctgttcatgctggtggcgttcggcatggcgcagttcatccaggcgttcacgggagcggcggtggtggtggcgaagatgtttctgtggctgggattggccaacgtcgcgcaccacgggccgttcaagccgttcatggtgttctgcccgggcatgctgctgtgctccttccccgattggttgggacgcagcgccgcatcgtttctggggcttgagacgttcgatcccgtcatcgcctcgttcatgctggtggtgaccgtggtgatggtggcgttcttcctgccgtctcgctcgcccgacgtgcagctgctgctgtccgacctgaacggcgacgagcgccgcgccatcggggaaggcgacggcatcgacgagcggtgccgcacggtgggggagcgctgcgggctctcgccgcgcgagatcgagatcatgcagtacctgtgcaaaggccgttcgcgcccctacatcgccgagacgctgtacctgtcggagaacacggtgcgcacccattcgcgccgcatctacggcaagctcgacgtgcacaacaagcaagagctgctcgacttggtgcgcggggaatagccgcgcgggccccggagggtcggccgtgctcgtcgacaagccggcagcgaacaccttgcgctgcattcgtccagctatctactcctcttcgactatcgatgagccttccgaacgatcgccattgaaccagcgccatgtctcgttcattctcagctttccgtcggcgcgtttcgtcggacggctccaacattctcctgcgcgtacttgacctgcgacattgaggtggtgataacagaagtgcagattgccttgctcgtcggccgttcctaaaaggctgccgcgcacgatatccccgccttcatagtgcgtccagacggtgcttccgttttgacggtagtgaaacttcgtgcgcccgtccacttctccgttcgacgagttttccttcgatatgaatgttcgaccgtcgtaagacatacatcctcctgtcgatgaaaatgcctacagcttaagcagcatcggttgattctgtgcgttggcgagactcgttcatggtttctccacgcaagattgacggatctccgagtgtccgatgacggttgcgctcgttcgcgtcgtccgttcgcttctccgcgtatcgtgggcgaatatgcaggttcgcgtcagtggcgaaggaggcggcgggacatgatgactagcacggtgcacgacgtggcgctcgtgttcgagggcggcgggatgcgcaactcgtattcggcgggcgcgatcagcgtcatgctggagcaggggctgttcttcgacgacgtgtacggattgtcggcgggggcgacgaatgcgatcgactacgtctcgcgtgatgcgcgccgcaacaaggcctcgttcaccgtctgcctcgacgatctctcgtttcgctggtgggtgacgccgttcgtggataccgacggcgtcagcgcagcgctgcacggcgatgcgcgcgtccgctcaagctgcgcgctgcccttcgacttcgacgccttccaggcgaacccagcgcgcgtcaccttgcaggccatcgaccgcgacacgggcgagacggtctatttcacgcgcgacgattttcctaccgagcaggcgctcatggaacgcgtccgcgcctcgacgagctatcccatcgtgctgctcccgacggtcgtcgacggacgcgcgctgtacgacggcggcatcggacggggcggcggcatcatggtgccgcgcgcgatggacgatgagctgagcaggttcttcgtcgtctgcacgcgtccgcgcggcttccgcagaccgctcaagcccaaccgcttctacgacgcgttcttctggcggcgtccgcgcatgcgggaggcgctggacacctggaaccggcgctacgacgccgaactcgaccggctcgatcgactcgaggccgagggccgcgcctacgtgttctacgcgaacgatcagggcgtgaagaacaccgagcgcgacgcggagaagctcgcccgcaactacgagcgaggccgcatgcaggctttatccgaattcgacaggtgggagcggttcctctcagggcagggggtttgagctttcggtgttgccatgcgcacgaattcggaagccgatgtgcggcaaaatccaggttttggcacgacggactggcgtgcgggtagcgtcccgaaagttggtgtatcaatccgtttctggagggcgggcgaagcctgcccgagaaaaacggacatcgtctagaatcgtcaatcaccacaaaagacagattcgaaggaaggcgatgcccgctatggacactctactattcaacgaccccgaagtgaaggggctcgcgttcgcgatcctcgaggaatgcaccgacctgcaggccttcgggcgcaggatgctcgagctcctggcgaacgccgcgatgtcggcgaaggccgacgaggcgtgcaacgccccctacggggagcgcgacgaggggcgcgtcaactcgcgcaacggctaccgggagcgggggctctcgaccgccgcgggcgacgtcaccctcaagattccgaagctgcgccgaggctcgttcttccccgaggacctgatcgagcgctactgcagggtggaccgggcgctcgtcgcggcggtggccgagatgtacgtcatggggatatcgacgcgcaaggtggaggccgtcgcgggcgagctcggcgtgaggtcgatgtcgaagtcgcaggtgtcgcgcctgtgcgagtgcctggacgccgaggtggacgcgttcaggaggcagcgcttcgacggggtgcgcttcgcctacctgtggctcgacgccacctacgtgaagtgccgcgtggaggggcgctcggcgtcccaggccgtcgtgaccgcgatcgggctcgacgacacgggccacaagcgcttcgtcggcgtggactgcgtggacacggagagccacgccgggtggaaggcgttcctctccggcctgagggcgcgcggcgtcgacggcgtgcgcctcgtcgtctcggacgcccacgaagggctcgcgaaggcgatagccgagacgttccaaggagcggcctggcagcgctgcgtcacgcacctcatgcgcaacgtggcgggccgcatccacaggaaggacgaccagagaaaggcgcgcgaggccatgaaggccgtcttcgcgcagaagagccccgtcctcgtgcgggcgtgctaccaagaggcgaccgaggaggtgctgaagatctcgagggcggccggaaacgtgctcttggaggccgaggaggcggcgctcgcctacctggcgttcccggccacgcaccgcaccaagatccgcaccaacaacgtccaggagagggccaaccgcgagatcaagcgcaggacgcgcgtcgtgcaggggttcccctcgcgcgagtcgctcatccgcctggtgggagcggcgctcatcgaggccgacgaggagtggtcggcgcgctgcgtcatctccaggccctcgctcgcgcacgcctggaaggcccaggagcgcgaggcccccggcgaggccgaggtgctcgccgcccgcgaggcggcgcgcaagatcatagggagcgccattgacccgaaggaggacgaaggctaagattcacctcgcaagggtgccggcgattctccggcgatggccctgatacaccacgattcgggacgcggccggcgtgcggctcgacaactcaaaaccccacctggggttttgtcgacgcgcgcaagcgcgatgcccttccgaaggcttgaaccgaacgcgcagtgtgccaaaacctggattttgccgcacatagcactttaaagaagtgtacgcccgcggtgcgtcgacccttagcggaaatcctcttcgtcggcgtgctcccagccgaacagcgcgtcgcccacgaggcggaacgaaaagggcagcggcggctgcacgtcgccgttgtcgatgtgctccgcgacgccttcgagctcctccaggaggtcgaagaacgacagctcgtcgagcgaaggcatgccctgcgccacctcttccggcgagatcagcaggatctgcagcacgatgtcgagatagccgtcgaggcgagcgttgtcatccagcagcgcctccacgttgtcgcgcccgaagaacgacttctcgatgcagtaccagcccacggcctcgggcgcatcctcgtcgtccaggtagttgctgaggatgatgccgttgtcctcgaggtcgttcacggtgaagcacgacacgagcgtctcgggagtcacgagcggttcgtcgttctcgtcaagatcgctcatcacgtatatgagctcggctgccagcccgtctgcgcccacgtcgagcgccagcccgtagcagtagccgggattggccttgcgcgtgccccagtagagctcgccgtggtgttcgagaagcgttttgacggtagcggccatgaggatccccttcgcgcgacgtgcttgatcggatcagtcgagtatagagcatcgtggcgaacggtggtacgatggtcggcgactgaaaggaaaacgacatgccgatcatccacctcgaagaccttgacgacccgcggcttgccgcgtactcgggcatgaccgacgcgcagttgcgcgattgccccgacagcgcgcacggcctgttcatcggcgagtcgcgcaaggtgatcgagcgcgcgctggccgccggggtgcggatgcgctcgctgttcatggaggagaagtggctcgatcagacgatgccactcgtcgatttgctgttggacggcgatcccgccttcccggtgctcgtggccacgcgcgagcagttccgcgccctgaccggctacgaggtgacgcgcggcgcgctggccgcgttcgagcgcccgcccttgccccgcgtggaggatctgctggcgagcgcgcgccgcgtggccgtgctcgaggacattacgaactacacgaacatcggggccgtgttccgctcggcggcggcgctcggcatcgacgcggtgctggtcacgccgtcgtgccacgacccgctgtaccgtcgcgccgcgcgcgtgtcgatggggacggtgttccaggtgccgtggacgcgcatcggaagcgagcgcgcctgggcggccgagggcgtgccgcttctgcgctcgctgggcttctcgacggccgcgctcgcgctgtcggacgaggcgatcttcctgcacgacgagcgcctgcgcggctgcgacaagctggcgctggtattgggcaccgagggcgacggcctcgcgccttcgacgatcgcgagctgcgactacagggtgaagatccccatggatcacgaggtggactccttgaacgtggccgccgctagcgccgtggctttctgggagctccgcacgaagtggcgcgattgagcgtcgtctactccaaatccaacccgtcgatcacttcccggagcgctttcgccgactcgtgaagcctcgccagctcgtcggccgacagcggggcgggcacctggtactcgatgccgttcttgccgaccacggcgggcatgctcagcaccacgtcgtgcaagccgtgcacgccgtgctggaagttcgacacgggcaggatgggcttctcgtcgcgcacgatggcctcgcagatgcgcttcaccgacatggcgatgccgtagtaggtggctttcttcttcgcgatgatctcgtaggcgctgttcttcacgtcctcggcgatgcgctgcatcgactcgtcgtgctcgaaatggccgcgcagctcgcagaagtcgttcacggggatgcccgagatgttcgccgtgctccacaccgcgatctcgctgtcgccgtgctcgccgatgatgcgcgcgtgtacgttgcgcggatccacgccgaggtgctcgcccaggatgtacttgaagcgcgcggtgtccagcaccgtgcccgatccgatgacgcggttctcgggcatgcccgacagcttcagcgccacgtgcgtgaggatgtccaccgggttcgacaccaccagcaaaatgccctggtaatcgcgctgtgcgagctcggggatgatggacttgaagatgcgcacgttcttatgcacgaggtccaggcgcgtttcgccgggttgctggttcgcgccggccgtgacgatgatgatggccgcatcggccgcgtcgtcgtagtcgcccgcgtagatgttcatggggccggcgaagggcatgccgtgcgctatgtcgagcgcttcgccctcggcgcggtcgcggtcgacgtcgatgagcaccatctcggtgaacagctcgctctgcatcaacgcgaacgcggttgccgaacccacgaacccgcaccctacgatggccactttccgatcgttgataacgcgctgcatacgcttccttccgtcgacatgttcgagtgagaacctactgcatcccggcgaacccgtcaaggtcgttcatcgattgtctgtaccgaaaaaaggatagggcggctatactgagagcgtggcaggcaagctgcaccgtcgtcgccaaggaggggccatggccatcaatcgtcagaagctcaagctgctgtacctcatgcggatgctcgaggaggagaccgatgccgaacgcggcctcacgatggcgcagatcatcgggaagctggaagcgctgggcatctcggccgagcgcaagtccatctaccgcgacatcgaggcgctgcgcgagttcggcgtggacgtgcgcacctaccagcgcgcgccggtggagtacgccgtggagcaccgcgcgttcgcgttcgccgaactgcagctgctggtggatgcggtgcagagctcccgcttcctcacgcagcgtaaaagcgacgcgctggtggagggcgtgaagcagctggcctcgcggcggcagcgcgcgctgctggacaagcgcgtgcacgtggaaggccgcatcaagatgcagaacgagtcggtgttcggcagcgtcgaccgcatccaggaggccatcgcgctcaagcgccggatctcgttcgtctacttcaagtacgatgcggcgaagcgcaaggcgctgcagcataacggcgagcgctacatcgagacgcccgtgcggctcgtgtacgcggaaggctactactacctggtcgtgttcaacgagaagcacgacgatttcgcgaactaccgcgtggaccgcatggaccgcatcgaggtgctggacgagcccgcgctcaaaaacgagcgcatcgccacgttcgacgcgcgcgagctggaaagccgcgcgttcggcatgtacagcggcgagccggtggcggctacgctgctggtggacgaggagatcatgggcgcggtcatcgaccggttcggcaaggacgtggagtcggtgccgacgggggagaagcaggcgcgcgtgtacgccacggtgatgaagagccccgtgctgttcgggtggctggctcagttcggcggccgcgtccgcatcgagaagccgaccgcgctggcgcaggagtaccgcgcctaccttgaggacatcgtcgccgcgtacgagtaggacgccgccgttccagcgcctcggctgtccgcgcgcctcacaccgcctgcggcatcgcctcttcgtcgtgctcgcaggcgggtcggccgccgccgacgaccagtcggcctccgtcgtcgaggacgatctccagttccacgagcaacccgttctcgtcggtgcagaacacaagatcgctcacctgccgtccgatggcgtacgagcaggggcgtaggctcttccagcgcagtcccgctacgggcgcgtcggtttccaagctgccgacgtgcagcgcgatgtgcggtgcccgcatcacgaatgcggcgaggtcgcaaccctcgagccgcaggacggtgggcgcaccgggcaggtaggcgcgggtgcgttcgtcgaacagggcgagcacgtctgccacgtacgatccgacggcgcaccgcgcctgccttcggttggcacgcgcgaggccgcgcgggttgtcgaaccatcgctggtacaggttcgcgaacgccgcggccgcgtcgacgggggcgaaaagggacgtttggtcggcttgtcttgcatgcatgggactctcctttgctctcttgttgcgtatggtacacgttcggcggttcaagcctgtcctttctgtgggacagctgccgatcgttcggtccgcatgacccgtctgcgccgctctctgcccgtgtgccttctccgcgccttgcgcgcgcggccgccgcaaggcgcgtcgtttgcgttagaatgacgcacgggaaacacgttggagacgctcgtcggtttcgagccgataatggatggagagccagtggccaagctatcgattgcgccgcggtcgcgcgacgatgcgcggattgccgcgcacctggacaccttcgcgcgtcgtgtcgaggcgacgccgccgggcatgtgcccgttggccgtgcagctgaccatgctgcagacaagcggtgcgcagacctgcggaaagtgcgttccgtgtcgcgacggcatcccgcagctggcggcgatgctcaagcgcgtggtggactgcgaggctgacgagggcgtactggagggcctgcgcgcgctggccgagatgatccgcgacgcgtcggattgcgccatcggctacgaggccgcccgcagcgtgctggagggtctcgatacgttcgccgacgagtatgcgagccatttgcgcgaccgttcgtgccaggagggcgtcggccaaacggttccttgcgagacgctgtgccccgcgcacgtggacgtgcccgcctacatcgcgctcacggcggcgggcgactacgccggtgccgtcaacatggtgcgcaaggataacccgtttcccacggcttgcgcgttcgtgtgcgagcatccttgcgagacgcggtgccgccgcacgcttatcgatgcgcccatcaacatccgcgggatcaagaagttcgcggtcgaccagatgccagccgaccaggtggcgcccccgccgcgcagcgtggacaccgcgcgcaccgtcgccgtcatcggcggcgggcccagcgggctcacctgcgcgtacttcctcgcccttatggggcatcgcgtgacggtgttcgaggaacgcgcccagctgggcggcatgctgcgctacggcatccccgcgtatcgctttccgcgcgagcgcttggacgaggatatccgcggcatcctgaacgcgggcaccatcacggcgcggtgcggcgagcgcatcggcgcgcacgagatggccgagatcgccgacacgtaccatgcggtgtacgtggccgtcggcgcgcagacgggcaagtcgctgcgcatcgacggcgtggatgccgaaggcgtcgtctcggcagtggatttgctgggggccatcggcgatggcgactatcccgacttcacgggcaagcgcgtggtggtggtgggcggcggcaacgtcgccatggactgcgcgcgcacgtcggtgcgcgccggggccgacgaggtctcggtggtgtaccggcgccgcaaggacgacatgacggcgctgccggctgaggtggagagcgccatcgccgagggcgtggagatgatcgtgctggaggcgcccgccagcatcgaggtggacgagcgcggacattgcacggcgctcatcacgcagccgcagatgatcggtcccgtgcgcggcggccgtccggcgccgatggcggccgacaagccgacgcgccgcatagaagccgacatcatcctcatcgccgtggggcaggatgtggtgtcgggcccgttcgaggagttcggcatgagcaccacctggggttgcttcaatgccgacgatcatcttgcggccgaagggtacgaccatgtgttcgtgggcggcgactgccagaccggcccctctacggtgatccgcgccatcggggcgggaaaggtggctgcgcgcaacatcgacgagttcctgggttaccatcacaagctgccgtgtgacatcgaggtgcccgaaccgctgccgaacgaccgcacgcccaaggggcgcgtggagataaccgagcgtcccgcgcgcgagcggcggctcgatttcgatggcgtcgagaacggaatgagccgcgaagaggtcgtgcaggagtgcgggcgctgcctgcgctgcgatcgtttcggctgcggcgttatggaaggaggcaggcaccagtatgcctagcatcacgatagacgggatcgccctcgacgttgccgaaggctccaccatcctcgatgccgcgcgcgctgccggcatccgcatccccacgctgtgcttcctgaaagagcgcagcgccatcgcctcgtgccgcgtgtgcgtcgtggacgtggaagggctcgaccagccggtgccctcgtgcgccacgcccgtgcaagacggtatgaaggtgaccacctcctcgccgcgcatcgaggcgtaccgccgcatcgcgctcgagctcatcatcgccgatcacggcctcgattccacgaactactgcttctcgtgcgataagaacggcgcctgcgagctgcaggccgtctgccgtgagtacggcgtgctggagtctcctttcgaggcagcgcagaagcgcgagcccgtgcgcgacgagaacccgttcctcgcttacgacccgaacctgtgcatacgctgccagcgttgcgtgggcgcctgcaacgacgccgcgcgcaaccacacgctgggaaccgcgaagcgcggcgttcgcacgctgatcgaggcgccgttcggcgcggactggcgcgccaccgactgcgagtcgtgcggcaactgcgcgcaggcgtgccccaccggagcgctcaccgagaagcgccgcgcgacgtaccgctcgtgggagaccgagcgcgtgcgcaccacgtgcccgcactgcggcgtgggctgccagctggatttggtggtgaaggacggcgtcgtcgtggacgccgaggccgcgccgggcccgtcgaaccacgggcttctgtgcgtgaaggggcgctcggcaagcttcgatttcgtcgacgcgcccgaccgcatacgaacgccgctcgtgaagaaccgcgagacgggagagttcgagcccgccacctgggacgaagcgctcgacctcgtggcgaggcgcttcacggagctccgcgatgtccacggcggcgagtcgctggcggcgttcgcgtgctcgcgctccacgaacgaggacatctacctgttccagaagatggcgcgcatcgtgctccaaacgaacaacgtggactgttgcgcgcgtgtttgacacgcccccacggtcgccggtctggcgaccatgcttggttccggcgcgatgacgaactccatcgaagacgtcacgcgcaaggcggaggtcatcatgctcgtggggtcgaaccccgaggaggcccaccccgtcataggcatgcagatccgcgcggcggtcgaacgcggctgccggctcatcgcggtcgacccgcgcgacatcgggctggccgcgcatgccgacattcatttgaagctgaggccgggaacgaacgtcgcgttcgcgaacggcattgtgaactacctgattcagcacgagctgtacgacgaggacttcgtgcgcgagcgcaccgagggcttcgagatattggccgcgacggtgcgcgactacacgcccgagctggtggaggacatctgcggcatcgaccgtcgcgacctcgtggccgcggcgaagatgtacgcggcagccgacgcggcggccatcatgtactgcctcggcgtgacggagcactccacgggaaccgacggcgtcatggcgctgtcgaacatcgcgatgatctccggcaacctgggcaagccgggcggcggcgtgaacccgctgcgcggccagaacaacgtgcagggcgcctgcgacatgggcgccggtcccgacgatttgcccgggtaccagaaggtggccgaccccgaggtggtgcgtcgcttcgagaaggcatggggcgcggttcttccgcgaacgcgcggcatcaaggcgaccgagtgcttcccagccatgatcgagggcggcatcaaggggctgttcctgttcggcgaggatcccgtgcgcaccgaccccgatacgcatcacgtgatccgctcgctcgaggcgctcgagttcttcgtggtggacgacctgttcatgaccgaaacggccaagtacgccgacgtcatcctgcccgggcgcagctacgccgagaaggagggcacgttcacgaacaccgagcggcgcgtccagcgcgtgcgcaaggccgtggacgggcctgtgggcgcgtggctcgacaccgacatcttcaccgaggtcatgaaccgcatgggctatgcgcagcctcgtctgagcgcggccgaggtcatggacgagatcgtctcggtcacgcccacgtacggcggcatgagccatgcgcgcctcgacggcgacgagacggccggccgcggcttgcagtggccgtgcccaagcgccgagcatcccggcacgcccatcctgcacatgggcgagttcgcccaggggctgggcgcgttctccacacccgactaccagccgtccgccgagctgcccgatgcggagtatccgctggtcatgatgacgggtcgcattctgtaccagtacaacgcctgtgccatgaccgctcgcaccgacggcgtgaacgagatagcgaaccgctcgttcatcgagctgaacacgtgcgatgccgaggctctcggcatcgccgacggggacatcgtgcgcgtctcatcgcgtcgcggctccatcgagtccgtcgcgcatgtgtccgagaagacgtcgccgggacatacgtggatgccgttccatttccaagacggcaacagcaactggctcaccatcgccgccctcgaccgcgtgtcgaaggcccccgagtacaaggtgtgcgccgtgaaagtggaaaaggcgtaagaaagcgatcgaagattcatcctggaacaacgaaggacccctatcaggggtccttcgcatatagagtcaaagttgccgcctccgcggcgccccgaaaggcaggtaaggggaacctatgaatttgcgcaatgtcgagtcgtaccaaatcggtcttgatatcggaaccgggtcggtgggatgggcggtgctggacggcgaaggaaatctttgccgcttcaaaggcgaacccacgtgggggagccgtgtcttcccgacggcgaacaccacgcatcggtcgggtatggtacagtacgggatgaagacgaggcacgccccgaccatcgaatcgggacacggcctcgttttcgcgttcatggttttggagcagtgacaaactggctggtagtcaaacggtgttgcgggcggcggggatcgacgacttggaagcgcggaaggccgtccggtcgaagcaggcgcggcttcgcgatctagtggccgagcacggcgaagtgctgcaccgcgaccgttggcgggagggcgtctacgagcgggcggtcaaggaggccaaggcggttgtgactggtgacctgctgttgtaatattcattgccaacatcatgattgtcgagggggagccatgcagtacgccaacatcaacgacgctcaagcggctatgacgtcggatcagtacgtcgggctaaacgccgatgggacgtacgggttgttcgatagggcgcagaaccctcagtgggtgggagcgtgccaatacgcgtaccaggtggcgggcgtgccgttcccgaacggcttgtacggagtcggcatgaccgcgaccgccacggtcgagcctgcggggaagcgcaagctgttcgcgctgctgctgtggttgttcctcggagtgtggggagggcacgacttctacgccgggaagaagtggttgggcgttgcccatgtcctgctgttcttcgcgtggctctggatgctgttcttcggcgtgctcatcccgatcaacggctacgagttcttcgcattcttgatactgctcgtcctgtgcgccatgacgttcgtcgagcttctcgcgctgctgatatcgtccaagtacggagaatgctcccgctggtagttctatgatttggaggggcctcgctgtgtagaggctcttctattgcctcgagtatccgatcatccgccccccccccctcatggtgggcgttttcctgatctaacccgcgatgccgttcctggcgatggtcgccgacagaagtagctcgtccattccgaaggtcgtcatcgcatcagctccgcacaccagctatagtatccccttgccgtcgcatcgattccggtgtctacccgcggggcgttcgagccacgcatcggggttcccgcggctccgaacctgcatccatcgtctttttcgacatgcattctcaggtacgtgcaataaagactttccgcgcttgtggacccagctggcaggtaggccgcgcaataggtacagcgcgggcatccgatcgtttcgttcaacgtcgcctccttttttaatcggcgttctgcgccgcccatcatatgtgacgctccctgcacaatcgaacgtgcaaggaggcgagaacatgagcgaatcgcaagagcaaacggctgtggtcgagtattgcgacatcaaggctttggagcagtgataaactgactggtaattagacaaacttcactaacgccatgctcctgctgcccaaggtcatcgatcgtggtatcgtctcggtaacctgcacaacgaacgaggcggtgtgcaggaggcgcatggcagtcgcgctccgcggcggctatgggtggcatcaacgttactggaatggtctcagagaaaagcgccgtcgattgacgttatcagcgtgctgtagaaggcggcgttcaaggaggttgcatgttctacacttacgaaggatctataattcgcgagagcgagggcggctacaccgtggccgtcccctccttcgagtgcatggtcgcaggcgggacgagcgtcaaggaggcgtgcgagaacgccgccggttgtttgcagctcctcatcgcggacatgcttgacaacgacgagccgctgccggaggcgaccttcggcgaggccccgcagttggtgctgtgcgtggaggtgggcgacggtttcattcgcgagagcttgtgcatgacgctcgcggaggcggcggaagagctaggcgtgtccccaggccgtgttgatcagcttctggattcagggcagctcgtcgcggcatatccgactggcaagcgcatggtcactatttcaagcgtcaacgaatgcaagcgaagcgcatcgcgccttgacaacctgtgcaggtcggtgtcggataacagctaagacggggaccttttgcttgctgatgcggtgtagtcccggcgggtcggttctgcctttgccgcaaagccaagcgcaagccgacctgggcgatgcttctaagcagcaggagcctggacgcgcgctgcggtccagacttcgggcaggatgtaagaggctcattgccaagtgacgcgaccttgtgaaaagcgtattcatgtacccatccacgccctttatcggatcgaccatcaaaaagtatggaagcgaccacccgatggagaagtgcttcgatgctcattgcgatgcgttcgatagcgctcctgaagaacttaagaatgaaatcaaattgccgagatccatcaagactgccgtagctgcttggaagctgccacgtgctctaaagtttggaacacggtgacgaatgggctggtggtcaagcacgtacaacggcgacaggcttgccgcagctgcgagccggggcctcctgctcggaatgtacaactatccatgcgcgtcgatgtggataaagactatgactgaatcgtgtcgtccgaggcgacgatgagagggcggactgaaagggcggggtatcatggagaaatctgcaagcatctatatcgacattgacggatccgacaacattcctccgtacgaccaatcgccagctgaacggttcgcaggaatgacgagggaggagatcgacgctatgatcgaggaggaggaagcgttgatcgcccgcagtggcggaaagtggccggcagttaaaaacgcgtaggttctcctcgaagagtccagtggggttttggagtagcggcaaattggccgattgctgccgagtcgatgcggcatgggctcgctggatcctcgtcagcactgctcgccatgatagcgttgtgggcgttggatctgctggtagcgtcccgaaagttggtgtatcaatccgtttctggagggcgggcgaagcctgcccgagaaaaacggacatcgtctagaatcgtcaatcaccacaaaagacagattcgaaggaaggcgatgcccgctatggacactctactattcaacgaccccgaagtgaaggggctcgcgttcgcgatcctcgaggaatgcaccgacctgcaggccttcgggcgcaggatgctcgagctcctggcgaacgccgcgatgtcggcgaaggccgacgaggcgtgcaacgccccctacggggagcgcgacgaggggcgcgtcaactcgcgcaacggctaccgggagcgggggctctcgaccgccgcgggcgacgtcaccctcaagattccgaagctgcgccgaggctcgttcttccccgaggacctgatcgagcgctactgcagggtggaccgggcgctcgtcgcggcggtggccgagatgtacgtcatggggatatcgacgcgcaaggtggaggccgtcgcgggcgagctcggcgtgaggtcgatgtcgaagtcgcaggtgtcgcgcctgtgcgagtgcctggacgccgaggtggacgcgttcaggaggcagcgcttcgacggggtgcgcttcgcctacctgtggctcgacgccacctacgtgaagtgccgcgtggaggggcgctcggcgtcccaggccgtcgtgaccgcgatcgggctcgacgacacgggccacaagcgcttcgtcggcgtggactgcgtggacacggagagccacgccgggtggaaggcgttcctctccggcctgagggcgcgcggcgtcgacggcgtgcgcctcgtcgtctcggacgcccacgaagggctcgcgaaggcgatagccgagacgttccaaggagcggcctggcagcgctgcgtcacgcacctcatgcgcaacgtggcgggccgcatccacaggaaggacgaccagagaaaggcgcgcgaggccatgaaggccgtcttcgcgcagaagagccccgtcctcgtgcgggcgtgctaccaagaggcgaccgaggaggtgctgaagatctcgagggcggccggaaacgtgctcttggaggccgaggaggcggcgctcgcctacctggcgttcccggccacgcaccgcaccaagatccgcaccaacaacgtccaggagagggccaaccgcgagatcaagcgcaggacgcgcgtcgtgcaggggttcccctcgcgcgagtcgctcatccgcctggtgggagcggcgctcatcgaggccgacgaggagtggtcggcgcgctgcgtcatctccaggccctcgctcgcgcacgcctggaaggcccaggagcgcgaggcccccggcgaggccgaggtgctcgccgcccgcgaggcggcgcgcaagatcatagggagcgccattgacccgaaggaggacgaaggctaagattcacctcgcaagggtgccggcgattctccggcgatggccctgatacaccacgattcgggacgcggccgatctgctggtgcggagtcacaaaattcaccgctgtgaaggggattttggggttcagagcgctcggaagcggcttttggtgcccgaacgagcgagttgtccgagcgtttgccctggtcgttgatcgtctcgatgatgatagaccctgcatcggacttcacagcggtgaattttgtgactccgcgtttcgttccgccgttggtgttggtgcgtatgaacccagttgcatgcgccagccgtgaaaagctggcaagatcgcttcccgtctcgcagctgctggcacctctccctgcgcccctccttcttttcgtttccaaaagatttcaacgccgtggggctttgttggagttgatctgcgcacgttgacgatgcgggttgcgtccgtgcatcattgacgagtacttttcggaacatcacggtgaggagcgcacatgacgaaaacgcgcgtcggcatattcggatacggcaacctggggcgcggtgtggagctggcctgcaggcagaacgacgatttggaattggtggcgctgttcacgcgtcgcgacccggcgacggtgaagccgctgaccgagggcgtgccggtgttcgccgccgccgatatggaggcccatcaggccgacgtggacgtgctcgtcctgtgcggcggcagcgcgaacgacctgcccgagcagacgcccgcatgcgcgagcatgttcaacgtggtcgactcgttcgacacccacgcgaacatccccgcccattttgccgacgtggacgccgccgcgaaggtgggcggcaaggtggccgtcatctcggcaggctgggatcctggcatgttctccatcgcgcgcctgtacgcatccagcgtgctgcccgagggcgaggactacacgttctggggccgcggcgtctcgcagggtcacagcgacgccattcgccgcatcgaaggcgtggccgacgcgcgccagtacaccgtgcccgtcgcctcggcgctcgaagccgtgcgcaacggcgagaagccgcagctgaccacgcgtcagaagcacacgcgcgagtgcttcgtcgtggccgaggagggcgccgacctggcggccatcgagaaggccatcgtcgagatgccgaactacttcgccgactacgacaccacggtgacgttcatctcgcaggaggagctgaaccgcgaccatgccggcatcccacacggcggctccgtgttccgctcgggtgtgaccggtcagaacggcgagcatacccacgtggtggagtactcgctcaagctggattcaaatcccgagttcaccggcagcgtgctggcggcctgcgcccgtgccgcgcaccgcttgagccgcgagggcgccgtcgggtgcaagacgatgttcgacatcgcccctgcctacctctccgcgaaaagtgacgagcagctgcgcgccgagatgctgtagcgattcgctcatccgatatgtcgaaggccccgtcgtttgcagcgacggggccttttcgatgccttagatcaaaacgccgttgcagtggtcgatctcgtgttggatgatctgggcggtgaagccggtgaaggttttgactcgcggcttcatggcgagatcctggtagctcaccttgatggtgcgatagcgcgtcgcggagcgcgtgcccgaaagcgacaggcagccttcttccgcctcgtaggtgccggcgcacgagatgatctcgggattcagcatggccacgtgcgagccgccgtcgtcgaagacgatgatgcgtttgagctcgccgatcatgttcgccgccatgccgacgcaggaatgacgatgcgcctccagcgtgtccagcaggtcctgcgcgatgggcaggtcggcctcggttgccggtgccgacgcgcgctgcagaaccaactcgtttctcatgatgggacgaatcatcgccaaaaacctctccacgtgacgagcctttgccgtttggtgcgacaaggctcgctttcctacactctcttggtatagtgtacgtgaacttgacagacgggaggcgcagatcgtggacgcagtcgcattcatgcgtggcaatagagcgtatttcgaggattttataacgaggagcacctatcattcgaatgccatcgaaggcagcacgctttcgtacgctgaaacgtatgcgattctctggaatgacaactcgttgcaagtgaccgctactgcacgagagttgtacgaggccatcaaccacaaatatgcgttgagccttgcgctcgaagatatgcaggcacccttgagcgagaggctcgtcaaggagatcgcgcgggctatcaacaagaacatcaatgaaatcgggggttacagaacggtttcggtgcttatccgcggtgcagagcacattccgccgaagccgaaccaggtgaaccagctcatgatgcagctggtatacgagtacaaccatgacgacgacgtcgatccgtacctgcgcgaggcgcgtttccatatccggttcgagcgcatccatcccttcgaagacggcaatgggcgtacgggcaggatacttgtcaatcgcgggctcttgcaggcgggactggctcccgttgtcgttccgttcgagcgtcgtgccgagtaccttgcgatgcttgccggcggcgacccggacgggcttgccgagatgttccggtcgctgtcccatgacgaggaggaacgcatcgcgctgttcgcggaagctgctcaaaagtagatcgcagtcgcgaaggcggcaagggcgaacaggattccgaatgccgccgcgacggcgcgctccttgccggcgaggccgaagccgatgccgcgcatgccttcgagcaagctggcctttctgcgggtcgggcgcggttcctcgcgcagccgaccgccggggatgacttcgatctccaccgtgcgggtcgggcgcgcgtgggctccgtgctgctgtcggggctgggggagcggtgcgagggctgcgttgctcataaggtctccttcgtcgacatctcgttcgtatgctgtgaaggatacaggaaacgcgcgcctcgcttgtcctattatagggacatcggtgcaagcgtgaaaaaagcccgacggcgaatccgtcgggcttgaacgatcgaagctggctggtgcaagcgatccggcttgctactccttgccggtccagcagtacgtgcacaccttctcgggatcgatgccgatggcttccagcatgccgtcgagcgactggtagcccagcgagtcgaagcccatctgctcgcagatggatttcagcatgcacttgccgcgctcggtggagccgtcggcgtactcgtcgaggtgctgcacgccctcctcgccttccagctggtccaccatgcggcgcgcgagcagctccatgtcggagcggctgctggagaagctcaggtacttgcagctgaacatgatgggcgggcaggccgagcgcatgtgcacttcctcggcgccgcacttgtacaggaagtccaccgtctcgttcagctgcgtgccgcgcacgatggagtcgtccacgaacagcagcttcttctcgttgatgagctcggggatgtggatctgcttcatcttcgccacgcggttgcgcacttcctggttgctcggcatgaacgagcgcgcccatgtgggcgtgtacttgatgaaggggcgggcgaagggggtcttgcactccgtcgcgtagccgacggcgtgcggcacgcccgagtcgggcacgccggccacgtagtcgagctcgggcacgccgcccgtcgcggcttcgtcgcgggccatgatggcgccgttgcgatagcgcatgacctcgacgttcacgccctcgtagttcgagttcgggtagccgtagtacacccacaggaaggcgcagatcttcatcttgtcgcctgcgggggagatggtgcggtactcgtcggggttcaccagcacgatctcgccggggccaagctcgtattcgtcgcgataacccagcttgtggtaggcgaacgactcgaacgagatgcagaacccgtcatcgctcttgccgatgagcaccggcaagcggcccatcttgtcgcgcgcggcgatgatctggccgtcctgcgtgatgatgagcagcgtgagcgatccgtcgatggattcctgcgcgtgcttgatgcccgagacgaagtcgtccttctggttgatgagcgcggcgacgagctccgtggtgttcaccttgcccgagctcatggccatgaactggcggccgccgctggcgaagttgcgctccaccagctcctcggcgttgttgatggcgcccaccgtggtgatgccgaacgtgcccaggtgcgagcgcaccaacaaaggctgcgggtcggtgtcgctgatgcagccgatgccgctgcaaccgtggaagccctgcaggtcgtcttcgaagcgcgtgcggaacggcgtgttctcgatcgagtggatctcgcgttggaagcatccttcctccgcgtcgtggaaaatcatgcccgcgcacttcgttcccaggtgggagtggtagtccacgccgaagaacacgtccagcaccacgtcgtgatgcgccgccgccccaaagaatccgcccattgcttgcctttcgttgtgcctgccgctaatccgtgccaacaaaaatatcagtatacggctaccgccggtccgaaggaacgctgagcggccacgatccgcgttttctgcacgagttcgcgcctcgtggcgaagcgttttccctcttcggttagctcttcttgtccggaacgatgaagatgaacacgagcgagctgatcagcagcaggaacgggtagaacagaaacgggatgatctggaacgccgacaccgcgaaacccagctccgtggcggccgagatggccacgagcatctgcgcgccgtaaggcaggatgccctggaacacacacgagaacgtgtcgagcagcgatgccgtcttgcgcttcgagatgccgtacgtcttcgccatatcggcggcgatggggttcgagatgacgatggccacggtgttgttcgcggtggcgatgtccatggcacccaccagcaagcccatgcccagctgaccgcctttcttgcttttgaacaggcttttgatgccgttcaacagcgccacgaacccgccgtactcgcggatgagcgcgcagatggccgacaccagaagcgccaccatcgtggtctcgaacatgcctgcggcacccgagcccatgttggccagcaggtcggtggcggcagtggcgcccgtggccaccatgatgatagagcccgacagaatgcccagcaacagcacgacgaacacgttcacgccgatgatgccgccgacgagcacgatgaggtaggggatgagctggatcaggtcgtactcgtgaacgacgctgccgccgaggtcggcgccgaacgacagtgcgaggatgatgacgagcgatacgatggccgcgggtagggcgatcttgaagttctcgcggaacttgtccttcatctggcagccttggccttggcaggctgcgatggtggtgtcggagatgaacgagaggttgtcgccgaacatggcgccgcccatgacgctggccacgcacagcggcaggctgaagccggacgcagacgacaccgccacggcgatgggcgtgatcaacgtgatggtgcccaccgacgtgcccatcgacagcgacacgaagcagctcaccacgaacagcaccgccacggcgaactgcacgggaacgacggaaagcagcaggtaggccacgctttcggcactgtcgcgacccacggtgcccacgaagatgccggccaccatgaagatgagcaccatggtgacgatggtcttgtctcccatgccgcggcccatgatggtaagcttgtcatcgaagggcagctttcggttttggaagcacgccaccagaagcgcgacgaggaaaatcaccacgacggggatgttgtagaagcccatgggaatgcccatgccgtactcgaacaagatgcccagtcccagatacagcaccaaaaacaccccgatcggaagcagcgccttgacgttgcccttcttgacggtctcggtggttttctcctccatattcgtcccttcttgccttcgtcttcgttgcggtgttccatcataccgtaaggtgcgggcaatagagggcaaggcgcgcgttttgagtgctacactgtggcgagagcggtcgaatggaggaaagcgacggtatgaagaagatactgctggtggcgacgggcggcaccatcgcatcggtcgaggacggacgcggcttggcgccggcgctgagcggcgaggagctggcgcgctacgtgcccgagatcgcggatgtgtgcgacttcgacgtggtgcagcccatgaacatcgacagcacgaacatgcgcccggccgactggatgcgcatccgcgacgagatcgtggacgcctacgacgcctacgacgggttcgtggtgctgcacggcaccgacacgatggcctacacggccgccgcgctgtcctacctggtgcagggcagcccgaagcccatcgtgctgaccggctcgcagcagcctatggccagtcccttcaccgacgcgaagctcaacctgtaccagagcctgctgttcgcggccgacgatcgctcgtgcgacgtgtcggtggtgttcggcggcgcggtgatagccggcacgcgggcgcgcaagcagcgcacgatgagcttcaacgcgttcaccagcgtgaacttccccgagatcgcgctcgtgcgcggcgagcgcatcgtgagggcggggtcgcctgcgacgtgcgcgggcatcgggggagcgccgcgcgcgtacgatagcctcaacgagcgcgtgttcgtgctcaagctgacgcccgagatgaatccgagcatcttcaacctgctcaagcgcgactacgatgccgtcatcctggagacgttcggcatcgggggcatccccgactacggcgactaccgccgcgccatctacggatgggtggactcggggcgcacgctggtcgtgaccacgcaggtgcccgaagagggctgcgacctgggcgtgtacgaggtcgggcgcgcttatgcgggacatcgcggcatcctcaagggcggcgacatgaccaccgaggcgcttgtggcgaagactatgtgggcgctcgggcagacgagcgaccccgacgagatccgcgacctgttctaccgcacggtgaaccacgaccggctggcggaagagggctaaacgcgctcggctgcgatggttccgaggcacacggtgtgcagcggcttgtagacggcgcccgcgcggtcgagcgtgctcttgtagagggtgacgtcggtcgcctcgtcgttttggggaaacgccaggtgcggcaggccgacgtgcgggatgcgagcgcggcgcgcgagggtgaagtgcgctttgaagggcttggcatcgaagggcacgtcgcgggcgcgcagctcgtcgcgcagacgcgccgccagttgctcgagctcgggtgcggcggcgatgcccagccacaacgtcgcgtcggttgcgcggccgaacttccccaggccgtcgctgcgcagcgggacgggggacgcgccggcgcaggcggcttccagcgcgtcggtcgcggcagcgagctgcgcttcgtcgacgtcgccgaggaaggcgagcgtgaggtggtaggtgtcgcgcttcaggaagcgcccctccatcgacgcgctcagccggcgggcgagcgcggccgcgtcgtcagcgaagtcgggcggcaggtcgagcgcgatgaacgtcctcatggggagctccttattccatgtcgagcggcatcttgcgcgcgggcgcgggaaagatgcggtcgagcagcgcgagatcgtcgcttctatactgcgtgcataacgcggaccgttatccccgtttggagccttgacggctgataccgcctttgtggcccgatgccttgttcggacccaagccgccgcgcagggcgcggttgagcttgggcgcgggcggcaaagggcgttcgatggcgtgcggcttcttgcccatgaggctagaccagcttgcccttgcagtggtcgatgccgtgctggatgatctgcgccgtccagccgttgaaatccttcttgcgcggcttgagctcgccgtcgaccagttcgctgtagcccaccttgatgcggtcgaagcgcgtgactttggagtcggcttcaagcgagaggcagccttcgacggccttgaacgcgccgagcgcctgcaacaggcgcgggttgtacatgacgtgcggctgatcgtcgtcgtccaggtacgcgatgatgcaggtcgtagcgccgatctggttcgccgccaagcaagcggcaccgtccatcgacgtcagcgtttccacaaggtcatccgccacctgcgcgtcctcggccgtggcaggggtgcatacctgcgagagggtggcctcgtcctttaccagttctttgatcatgatgctccgttcaaggatggttcgtcattcgatgcttgtccgaggattttatcatgaaggaggacgaggttttcagctttcgccgtttttgcgcttgggcttgttggtgcgggatgttgttgacgatgcattcaagcgctcgtcaatcaagggcggttctaattcaggtagttctcggggatagcccgtgcggcggttttctgctcgaagctgtaggcgatgttgagcagcttctcgtcctcgtttctccctgcgacgaaggtggcccctcttggggcgccttcgtccgagacgccggcgggcaccgtcagctcggggtatcccgccgtggctggcacgagtacgccttcgttgtcgtagaacacgagggcgtcgagcttctcgtcgcgaagcaggtcatcgatcctgctttgcgcggttttgaccatcgcctcgaccttcgctttgtcgaattcggtcacttcgttcgcgtcttcaaggagatcctggccatatttcgcccgcctgctcgggtctttctggttgaaggcgatcagatcggaaaggcttttcaccggcgctactgcggagaagttggcggcagcggccgcgccgcttccgaagctggatccttccggcgaaaggttgaggggatcgaagggattgtgggtttggccggccttggagctgtagccgctcggcatcttcgtgtccatgaagtttgcgagttcggacaggttcgatttgcccaatatgatcgcaccgctgttcgtcagggccgttactacgtcagcgtcgtcttttggcgtgaagtccttgagcgcgtaggtgccgtcgctggtgggcatggtgttcgtgttgacgttgtctttgacgaggacggggattcccctcatccccgccggagttgcggagctcgcgtcgagggcgcgggcttcctctatcgccttcggattgatcgccgctactgcgttgatgcccttttcaccggcatcgtatgttttgatgcgattcaggtagaacgccgtcagttcttcgtaggtcaagtcgcccctggagatcgccgcgtgcaggtcctcgatggacttctccatgatcaggtcttttttcgcacggactttttcgaggtctatcccggcaagctgcgagtcgatgagcgcaacctgttggtctttgtcgtaggagatgcgctcttcctgttcgggcgcgagcgatcttggaagcgctagcgccgctatggcaacgccgaccagggcgatcaatatgatcgatgcgggcagtatgattttcaggcgggtcttcatcgcggtctcctcgcttcggttggtgatgcggtgtctgcctctgtgttttcggttgcgccgtggtgctgcggggtttcgcccgggaggtgggttcgtccaacggcattttgttgctgcggtcttttatgccacgtcaaacgagatttcaggtgtttttaaggttaggcgatgcgcgacgaggagccggttggtgtggggtgtgggcatgtgggtggaaaccgagaaaagtgttttttgtccaatattcggtacacggtaggcgtgtcgattgttgtatgctgagttttgcaggtagcaattagttgaaggggaaggtatgaaaaagtcgggatgcctcggagctcttctcgcgttgcttcttgctccttttgtcatcatagggaaggtgctagcgtacctggtcaaaaaggtctgatccctgcagaggagccttcgcgctgtcgtcattttcggaacggctgtctcttcgggatgtttcgtcttttaatcgcgagactacgaagggggatcggcggtctgcatacgaggggtgaatgtggctatttgcaatctagatcaactcaacagaatcgacctgcgtaaggtgtggccgaacgaggcgcgcgacttcactaagtggctttccgtggagagcaacctcaacatgctcggcaatgcgatcggcatcgagctcgagctcgtcgagaccgagtcatccgtcggctcgttcaacgtcgacatctacgcgcaggagtctggaaccgggcgcaaggttgtcatcgaaaaccagctcgaggatacgaaccatgaccatttgggcaaagtcatcacgtacgctgccggcaagggcgccgaagttgtgatctgggttgttgcccgcgcgcgcgacgagcacaggcaggcgatcgagtggctcaaccagcacaccgacagcagcttcggtttcttcttggtggagatagagctgtggtctatcggcgactcgttgcccgcgccgcgcttcaacgtcgttgaacagccaaacgagtggacgaagaccatcaaacttagcgagtgcctttccgagaccgaacgcaccaagctgtcgtattggacgaagtatcgtgaggtcgcgcaggcatcgtttgagtttctgaaggttttcaacccgcagaagccttcgaaggatcattggacgacgctgcgctgcggaacatcgtcctatcatatcgcgttgctcgtcgatacgcagcgcggctgcatcggcattgagttctacgtgccggacaataaagagatcggtcgcaaggctatcgagaacgcgtcattgttcgaggagcggctagggcttgtagagaagcccttcgatgccaagaaagcatccgggctgcgattctacaaggaaggctgcaggatcaagggcaaccaagatgcctggccgggtttcattgcccagcagctgagatgggctcttgtgatgaagaagattgtcgacgaattggagctgtaggcgatgatggacctgaccttgcttcgagcccttttgagctcgggatcaatttgctgagcgattgccaggcgaggggagtgggatccgaggcgatgcgggctttcctgcttgggttcgaggaggtcgtcgggccaacggggtttgtcgcgaagatcgaggccgccaacggcaacagccggcgcatgtccagaaggctagggttcaggctcactggcatcgaggccttccttactgaggatccgcaggtgctaagaagtcttgaggaatcgaggctttcatgcattgatgaagccatctgcgcccttgccgaagagctcggtgtcgagcctaggacgctcttgagccatgttctcgtgttcgaaaaggatccgactcgcgaagaggaattggggtaatgtcgcatttgtccaatgtctggttgtaggggtgccatagagacagattgagtcggctgctgttggttgcgaggtgacgcatgagatggcatgaggcaccaaagcgcgccatataagaaccaccgggagagacggaaaaagcacccagcccggtgggtgcgagagcgcgcggggctgggtgctaacagatgtcaaggtattccaaagcgtacagaaatattagaacaagtgttcccttgcctcattcagggattcgttttctccagtgaactctaattgtttggagttcatgtagtttgtcggattgtccctagcttttatgagtttgggaaccaaatgggaatcggcgatcttggatgttgagctctttcttgaacataaaagcatttgctgtttcgccatttgcaaaccctaacttcttgtgatggagcttcatggtgctatgcatgtggaaataagctctaattagggcggttctccgctttgcgacaagtgtttcgctttcgaatgcgcttcggaaagaatcgacagcttcttgtcttgctttgcttgtattgcttatctgggttcgcttgtcctttagcttgtcttcaagggctttatggatgaaactatcgttaagatgggaaagacgggcttcacgagctgcttcaagaacggctttcttgtaagcacggaaagcttcggtaacatctctattttccttaaccgcctcaggaacgtctcgcctaaaagatgtgtcgatttttgccaaagcagttgcataatcaatcgacgtatattttttactgctgaagccgtaggagctttttcgaacttgattgataacttctcgtcatgatcaacgccgtatctgccgatgaagtcaattagattctcttgtcgttctgcttcaggttcaagaagctgctcgttaaattgaacactatattcactttcgattgacctggttttgatctcttcgacttgatcaaacgctgagccgaagtagagcttcaatttcttattgaaagcttcacctttgttttgaaacagcgaagagacatagctctgatcgaaatagtcaaagcggaaggagccgtcagacaggctcgtacccgataatgaagtaacggcggggatttcggtcttcagaaactcaatcctttcttcatcaaccggatcctcaaatctggcgttgtccagcgagagtgcaatcctgtcaagtagagcggatttgccgctgccacgcccgccgataattgcgttgagttttggggataacccgattgactgttcgccgattattgctgttccaagatactttcccttttcgttttcaggtatgaaaaattgtgctggacgaattcgggatagctcagatccaaccatctgaatgcctgaaaaataggcaagttggctacttgtgttgctaattcgactaacgattgtttagatagtgaatccagcaagtagcccttggcgtcggacaagcccggtttaacgggccgtctttcgccgcaacttgccgcgctgatgcaggctatgcgggggatctcccgcgcccctaataaccgggcttaacgtcccttggcaacaagctaatgcgtttacatggaattctatgtaaaatatgaccatgcataaaatggctgaaaggtgcacatcatggccataattcgtcccgtaacagagcttcagcgtaaggtcggcgagctctccaggcttgccaaggaaaccaaggagccgatctacctcaccaagaacggtgccgagcatcttgtgctcatcgactccgataccttcgccgcgcttcagaagcgcgcggaagaaatgcatcaaaaccagaaatagcgaaagctcgctaaaatccaccagaacaggggctgttatgaacagcgatgaattgattaagaaagtcggcgtaaacattcaggaaaaggcggcgctcatctggaacgggtcgcgtcccgaatcatggtgtatcaagggtcgtcgcctggaatcgccggcacccttgctcggtgaatcttagccttcgtcccccttcgggtcaatcgcgcttccgatgatcctgcgggccgcctcccgggcggcgcgcacctcctcctccgtcggggcggggcgctcgggcgccttccaggcgtgggcgagcgagggcctggagatgacgcagcgcaccgaccactcctcgtcggcctcgatcagcgccgcgcccaccaggcgtatcagcgactcgcgcgaggggaacccctgcacgacgttggcgcggcgcttgatctcgcggttggccctctcctggacgttgttggtgcggatcctgatcctgtgcgacgccgggaacgccaggtaggccagcgccgactcctcggcctccagcagggcctcgccggcgcccttggagagcttcaggatctcctcggtcgcctgctggtagcacgccctcaccaggatcgggctcttctgggcgaagacggccttcatggcctcgcgggcgcggcgctggtcctccctcttgcagatgcgccccgccacgttgcgcatgaggtgcgtcacgcagcgctgccaggcggcgccctggaaggtctcggccgccgccgccctgagcccctcgtgcgcgtccgagacgacgagcctcacgccctcgacgccgcgtgcgcgcaggtcggacaggaacgccctccagcccgcgcggctctccgtgtcgacgcagtccacgcccaggaagcgcttgtggcccgtgtcgtcgagcccgatggcggtcacgaccgcctgggacaccgagcggccctccacgcggcacttcacgtaggttgcgtcgagccagaggtacgcgaagcgcacgccgtcgaagcgctggcggcggaacgcggcgacctcggcgtcgaggacctcgcacaagcgcgacacctgcgacttcgacatcgacgacacgccgagctcgccggcgacggcctccaccttgcgcgtggacaccccccatgacgtgcatctcggccaccgccgcgaccagagcgcggtccacgcggcagtagcgttcgatgaggtcgtcggggaagaacgagccggagcgcagcttcgggatcctgagcgtcacgtcgccgacggaggtggccaggccccgctcgcggtagccgttgcgggagttcgtccgctcggggctgcgctcgccgtaggccgccccgcattcctcgtcggccctcgccgacatcgcggcgttcgccacgagctcgagcatcctgcgcccgaactcgcgcaggtcgacgcactcctccaggatcgcgagcgcgagccccttcacttcggggtcgttgaatagtacagtgtccatagcgggcatcgccttccttcgaatcggattttgtggtgattgacgattctagacgatgcccgttttcctcgggcgggcttcgcccgccctccagaaacgggttgatacaccaactttcgggacgctaccctggaacgttgcggacacgttgcgcggtccctacaagccccacgagtacggcctcgtcatcttgcccatgacggtcattaaacgttttcacgactgcctgctgccaacgcacgggaaggtcgtggaagccgcagaggagtacaagaactttgccgtcaaggacggtttcctccgagaggcatccggttaccccttctacaacacatccaagttcaccttcgagacgctcaaggccgaccccgccaacatcgaggacaacttcaaggactacctcaacggtttttccgaaaacgtgcaagacattttggcgcgcatggatttcttccgccagattgagcgcctgagcgatcctgatgcacctttgctgtaccaggtggtgagcgacttctgcgcggagcgcgccgacatgtctcctgagaagatcaagcccgttgacatgggctacatcttcgaaaatcttatccagcggttctccgaatcctatgacgaggatgccggagcccacttcacaagccgcgacatcgtctatctcatgaccgatttgctgattgccgccgacccccatgtcttcgacggcgatcgcatctccaagaccgtatacgatcagaccatgggcacttcccagatgctcagctgcaccgaggagcgtttgcgccagcttgacgatgacgctcgtgtgacttgcttcggccaggagttcaatcctttcacctttggcatcgccaaggcatccgcgctaattcgtggagaagacgatgcgaatatgcggtttggagacaccctatcatcagacaaattcgcggattataaatttgactactgtatttcgaatccgccttttggaggcgactggaagcttgaagaaaccgccgtcagaaaagaagccaagcttactggaagccgattccatgtcggacttcccgctcgtggcgatggccagatgctctttatgcttaacggaatcgcaaagctaaaggacgaaggcgtaatggtgattgtccaagacgcatcgcctctttataaaggaaaacctgaaagtggcgaagacaagattcgttcctatattcttgaaaacgattggctcgatgcgattattcgtttgagtggagacgctttctacaacacagggttagtaacatttttatgggtcatcaataaaggcaagcctgaaaaacgagcaggaaaagtgcagttgattgatgcctcgggttgttgcgtgccaagaaatagacccattggtaaaaagaggaatgacataaccaaattctgtcgtgatttggttcttgaggcgttctcggattttgagacgaaagactactcgtcttcttcagaaagcggcaatgccattcatgtacgttctctggtttgcgatgctgctgattttggctacaacagggttggcgtctgcgaacccctgtttaaccctgatgggtcaattgtggtcgataagaaagggagcccggttgctgatgccgagagggaagataccgaagatattccgcttagttacgatattgacgaatacatggaaaagaaagttctgcctttcaatgagcatgcgtggctaaacagaaagaagcaaaaaacaggttacactatcccattcaccaggttcttctatgaatttatggatcttgaaaccgtcaatgacgcggctcaggaactttcttgctcgatgaataggagtgctgcagaagttggtaggcgtttcgccatgcttcctgatccggagatttgctatgaagcaagcgaaacatggctaggtgacatccctgaatcttggagtgctcttcgtattggagacctgttcgaattaaggtcaacaaaagtgagtgatgaagattaccgaccgctttccgtaaccaagaagggcatagtccctcaacttgattctgttgctaaaagcgataaccatgcgaatcgaaagcttgtaaaagaaggcgactttgccatcaacagccgatccgaccgtaggaattcttgcggcttttctccatacgatggatctgtttcaactattactacagtcctttttccgaggcagccaattgtttcgagatactttgacctgctgttcgacaccccaaggtttgcagaggaattctaccgatgggggcatggaattgatagcgatatctggacgaccaattggtcggacatgaaaaagatcgttatcccatgtcctccaatcagtgaacagaaaaggatagtggattatctgtctgacgaattgaagcaaattcgttctgccagggcgtctgttcaggccgagatcgagaatatttcgtttgatgtggtgacggagagactctgtgctatcgatgacgctgtaagtgatatgacggacggcaacaaacagaatgtacttgccgaattaaagcttggtcgcttgagtgagtcccttgaatcgctcaacaagcttcaggagacatttgtgtacgaaatcgttactggtaaacggagggctatgtaatgattgtcacaaaagagaaaaatttagaggaagacatcgagtccttcctctgttcagaagcgggtgggtattataaatctaaagacagccaatccctcctatacgtcgaagacggaacctatcaggttgtagacgggcacggctaccgagatatgcctggaaaaggtattgatatcgcaacattggtcaattttgtccagaccacgcagccaaaagcttgggagcgttttgagaagcagtgcaattccgatcctgagaagaagttctttaaggtttttcaagatgccgtaagtctttacggcatcgttcatgtactaaaacatggtttcaaacatcgaggcatagccttcaaagttgtgtatttcaagccagagtcgagcctgaatgatgctgctaacaagcgatatggccaaaatgtttgccgttgtatccgccaatttcattatgagacgattcctagccattctgtcgatatggttttggatgtaaacggaattcctgttgtcgcaattgagctaaaggatcagttcactggccagaacgtcgaagatgccatgcgtcagtggcgagaggacagagaccctcgcgaagaatcgttcaaattcgataatcgtgtcgttgccttttttgccgttgatctttgcaacgtgatgatgacaacaaagattgaaggtttgaccacttccttcttgccgttcgaccaaggttcgaacggagctggaaatgatggtggttctggaaatcctaataatccacatggttatgcaacttcgcatctttggaaagaggctctgcagaaagatagcttgcttgatattctccagaagtttattcaccttgaagtaaaggaagaaacgaaacttgactccaaaggtatcgaggttaaacagaagaagaaccgcataatattccctcgctatcatcagcttgacgttgtcagaaagattgttggggatgtcatcgaatcaggatcgagcagcagctacttgattcagcattctgcgggatcggggaagtcgaacagtattgcttggacagcgtatcgatttgcctcgctgtttaggggtgacaagcccttgttcgattctgttgttgtcgtcaccgaccgcagggttcttgacgatcagctgcaagaaacaatcagcggattcgaccatgctgttggcagcgtttgtattattgacaaaaagaaagattctggcgacttgcgcgatgctctaaacgatggaaagcgccttatcgtatcgaccttacaaaagttccctgtaatctttgaggaggtcgaaagcagcggaaaacgtttcgctgtgattgttgatgaggcccattcgagccagactggtaccagtgcgctcaagcttaaggcagccctcgctgataccgagcaggccttgcgggagtacgccgaaatcgaggtcgaggctgaaggtgaggtcgaagactgggaggatgagctcgctaaggccttgtccgtgcatggtcgacatgagaacctgacattctgcgcgtttaccgcaacgccaaaggagcagacgcttgagatattcggagtggaacatccggacggatcttatcgcccgttccacatctactcgatgcgccaggcgattgaggagggctttatcatggatcctctcgcccattacgtctcctacagtgaggcgcttgaaattgccaggacgattcctgacaatccagatgtcccatccagtccgacactgaaattattgcgcagatacaaggagttgcatccttacgctttgggccagaaggcggagatcatcgttgagactttctgctctgttacccggaagaagataaagggcaagggcaagatgatggtcgtcacagcatcgcgccttgcggctgtgcgctattaccacgaagtaaaacggtatatgcagaagaagggatatgacgaccttgaggttctggtcgctttcagcggaacgatagttgatcccgccgatccgggtggtaaggaatacacggagccaggaatgaatgtaggccatgacggccagagggttgccgagagccagactaaggcagagttccatgattatggcgacatgctcatcgttgccgagaagtaccagactggattcgacgagccgctgcttcacacccttgtgatagataagaagcttcgtgacgttaaagccgtccagacgatttgccgcgtaaaccgcatccatcccgacaaagaggacacttacgtacttgacttcgtgaacgatcctgcaaatatacaggaagccttcagccgtttctatacggagacctctcttactgagcaaattaatactgacctgttgtacaaggttcagagggagatcggggagttcgggctttacgaccaatcggatatcgaggccgctgcagatatcgcctttaccgagggcggcaaagaccgcgcgaacctgcaagggaaacttgccggtgttttgaagcccgctattatccagtacgatttgctggatgaggagcgccaatatcaggtccgaaggaaggtgcgcagtttctgcaagtggtattcgtacatcacccagattgttcgcatgtttgacaaggatctccacaaggagtatgtctacctgaactacctgaggcactttctgaaggccgaaccaatccctgttgagggcatcgacgataaagttgagatgcgcttttacaagctcaagaaggaatttgagggcagtatcaccttagaggagggtggcggcgtgctcgagccctcttcggggtctggtagcagtagcctagacaagaagaaagatcccctgcaggccctcattgataaattcaatgaacagtggcttggcgagtttaccgagggcgaccgtgtggtcatcacgactctctggcagaggatgtccgcaatgcctgaaattgaagacaccatccgccgtgatggccgtgttgtctttgagaacagcgtcctaccgaaggcttttgatgaagttgcaagaaaagcttacgtggagaacacagaatcgttcacctcgctttttgaggacagcgcaaagtacaaggcaatgatgtctgccatcggcgaactgctagtaagccatttcgttggtaagtaagggaatcttaagaaggaacgataactttctgataagtgatagacgctggttcccaataatccccctggttcccaaatggttccttttcagcagaaatcacgtgcggccattctgggtcattgttggccatctggtaaaaccaggagacaacaaaggttaggtagacaaacaaatctacccaacccttttcggtgctgtactgcggttttcctttggattgcaccttctcccgacaaactacggagagtaaaccacgctccagaaagcctcttatcaactggtaaaactaatacactttttactgtacattactcccactcagtgactaatccagtacgggtgctgccgatccgtgccgcgtcataccgcctaagggctgattcgtgcgcaatttaggcgaatcagccccttgattcgcgatttcgggaatgactcaactgattcgcgaaatcgcaggtcgctcctttaatcattcccgggtttccgccaggattcgtagcggatggcttaaaacagagtgattcggagaccaacccgcacatatcgctatcgcttcatcttcttcaagttagcaagcttccattgcgcttccgggctcgcgacagcggcttgggcgatggcgcactcaccgaagaggagctcggggcggtattcccctttggcgaacaagtccaaatagagtctctcgccgtcctttctaggcaggatgtaggccgacgtgagctcctccgcgtcgagcatcaagcctgctggcgtcggctctttatccctcgaatgcagcatcggtagcagctggtcttcgcgcaaatacctttgagctccagcatggactgggctacagactgggaatttcatccggcagcggagcctgcatgaacgatttaggtgccctctactatatgggagaccttgttgaacaggactacgccaaagccgcggaactctacgaaatggcagctgacgcaggttgtttccagagcatcatcaacctcggttatatctacgagtacggaaggaccggcaagcccgaccacaccaaggcctatcagtggtattcgctcgccgcagcgcttgcgccctccagcgaagcggtatacaaactcggcgacatgttcggccgcggtcgcgccgtgccacaagacaagtcaaaagcataccgtctgtacgaacgcagtcttgagcttgtccgcgacgatgttgagtttgtccagcccgccattcgcatagccgctatgctcattgaccccgatgccccctcctgcggcatcgaccgtaatcccctacgcgctgacgctctatcagcgcaccgagattggcctgcgcatcgacatcgccaacggcatgacgtattacaccaagcgcctccgcgaggcgatcgaaggccaagagaaggcccgcaagctcgtcgaaatggacgattttgtgattgaccgctaacaaccgctcacgcgcgtcttgccaacattggtaatccgctcccgctctgaaacccttcatggcaggagcggattcgcatctcgaagaatcgaaaacaaagaggccccgggattcccgagacctcctcaatatacatagttcagcttgtttactgttcgctcttcgcaatcgcctggtcgataagcttgtcaagcgccgcgcgctgctcggcggagctgatggcgcccatgatgggctcccctacgatgttgccgttctggtcgataacgtaggttgtcgggaacgagaacagatttgacgtaaacttgccggcctcgctatccgacttgaaccagatgttcttatatgtcacgcccttcttgctcagcacgtccttggcatctgcaatctcgtccttgttgccatcgagcgtaaaggaattgacacccacgacctggccacccttctcggcaagctccttgttcaggttctcaagatcgcccagctcgcccacgcacggcttgcaagtggtaaaccaaaagttcatgacggtgaccttgttcttagagaacagctcgtcgctgctcacgtcgttgccgtccaagtccttgcccgtaaagctggggaacttcgtcgcctcgctcgaagcatcggcgccagccgtcatgccagcggccgaagcgtcgacgctctcgcctgcgctcggcgtgcttccacagccaggaaactccttttccaggctctcgagcttgtcctcgatctccttgatctgctgcgcaccggccttgagcgtcttcaactcatccgctgcaaactcatccttggcgccgtcgatggtcttgagcaggaaatcgccataattgctgccgtcctcgatcatcggcgtatctttattggcggcaagaaacaccttttcccacagcgcattatcgctcgagaggatatcgttctgcttctgcatgagcttcgcatagagctcggcggcctcgtcggcgttggccggctcttgcgcaatgagctccgcgatcttaggatcggagcccgtagattcgctcgcgttgccaccgggcgccgaacacgccacaagacacagggccagcaccggcaccataaacagggccgcaatcttagatagtttcatggtcattcctccgttttgtcgaaacttgcttactttttatcggcggtcagagggagcttttcttccgacacatccaggccatagcgatagctgatggcatcgacgggacaggccccgatgcactttccgcaccggatacattcggcatgattgggtgcgcggaccacatcgacgtccatctggcaaacctttgaacacgtgccgcacgagacgcatttgcatgcatcgacccggatccccagtaaggacaccttattcatgagcgcatagaatgcgccgagcgggcaaatccatttgcagaaggggcgatagaacaaaacgctcagcaccaccacggcaatgagaacgaaaagtttccaggtaaagagctgccccagcgcagatcggattccagcattgacagccgccagcggaatggcgccctcgagcacaccctgcggacagatgtacttgcaaaagaacgggtcgcccatccccacatcgttgaccaccagcacgggcagcaataccacggcaagcagcagcacgccgtatttgatatacgtgagaggtttgagccttttcgttgagagctttttgcaaggaatcttgtggagcagctcctgcagccatccaaacggacacaggaacccacacacaaagcgccccagcaacacgccgagcaagatgagcgtgcccgtgacgtaataggaaaagctgaacttggacgagcccaccaccgactgaaatgcaccgataggacatgcgcccgcagccgcagggcacgaatagcaattaagccccggcacgcaaaccgttttttccgcgccttggtagatgccgcctttggcgaagtttggcagatggatattcgtaatgagcgttgctaccgcctgaatgaatccgcgaaatcgggccaaaatatgcgacgcagtgttttctcttttatccaattccgatacactccaagcacagcctaattgctttggccagcacggcatccgcctcgccacgcataacgccaaaacacaccatggcaattccgacgatcaacaaagcgacctgtaccatgggttttaccgccttgaacaacctgaccactcctttcgttacgcaaccattgaaccatatcgaccataaaatccgtgttaagcgcgatttgaaatgtgcaaggagattgttatgcgtattttaatcgtcgaggacgagcgagctctatgtgacgcaatcgcgcgcagcttgcgaaacttggcatacagcgtcgactgctgccatgatgggcaggaggcgctcgacctactaggcgttgaagtctttgacctcgtggtactcgacctcaaccttccccgtatcgacggcatgaccgtgcttaaggcacttcggaaaaccgaccgcgagaccaaagtgctgattctgtccgcacgtggcaaagtattcgataaagtcaccggactcgatgccggcgccaacgattacctcaccaagccgtttcatctggacgagctcgcggcgagaattcgcagcctcacgctcaggcgcttcgcacaagacaacatagttttaacctgcggaaagctcagctttgacaccaaggcgcgcatcgcttccgtaggcggcgaagcgctgtctctcacgcgcaaagaaacgggaatcttggaatacctgatgcttaaccaggggcgcccggtaagccaagaggagcttatcgagcacgtttgggatagcagtgtgaacagctttagcaacgcaacccgtgttcatatctcgtcgctcaggaaaaagctgcgcagcgctttgggatacgacccgattcgcaatcggattggagagggctacgtcatggaggatagcgaatgaaaaggctttcgctgcaatggcgcataacgatcatgacggcacttctgacgtgcgcggcgtgcatgctgacaaactgcctggtcggctatacgggcatgcgctacatggacgcaattggcagtggcatctcggctcttagcacagccgacgaagatacgccccaggcgtttgacccaacgaacgtggccctcgatgacgaggtcacggtcgtcgtgaataacgcacaagagtcttttggcgcgaccgcctggtgcatcacagctggagtcacgctgcttggtggcgtgctggcatactttgtgagcggtcgtgcgctcaagccgctacgggcttttgccgctcaagtagagcgcgtgcagcctgacaacctaagcgaaatcaacctcagcgaagatgtgcccaccgaactgcaacgatgcagcgcctcattcaacgatatgatcggtcggctcgacgaagggttctccgcacagcgtcagtttaccggcaacgccgcacacgagctgcgcaccccgctcgcccttatgcaggcgcagattgaactgttcgcctccgagcatcccacatcgcaaccccaaacagccgagctgctcggcctgctgcaagaacaaaccgagcggatgtcgcgaatgaccaaggtgctgcttgagatgagtgagctccacagcgttccctgcgaggacgatattgagcttggccccctgtccgaagaagtcctcaccgaccttgctccgcttgccgagcataaagacatcgtcctcaattgcagtggaggcgctctgataatcggaagcgacacgctcctctatcggctggtgtttaacctggtcgaaaatgccatccgttacagccgccccggctccactgtcaacgtctccatctgcgacaacgacagtcacgtgttcctgcgagtcgaagatcagggcccgggaatacccaagcagtaccgtgagagcatcttccagccgttctttcgcctggataaatcccgcagcagggcatacggcggcgcaggactcgggctagcgcttgtttgggagattgcagcgctgcacggcggcacggttgaggtcgaagcaagttccgagaacggggccaccatgctcacgacccttccaaaacggaccgcagcgtaaaccagccattaaaaggaaagggtcccgtgcacgtttgaactgcctcccatttcttgaacacgagaaatgggaggtttttggactggtcaaggtttcttggacggaaaaataagcttcttcaggcaacatctcgctctaggtcgcacggggcgttatagccgatcgatgagcgcatcctctgcctgctgtagtagagctcgatgtatttgaacgcgtcctgcttcgcctccccctcgtcttgtggccttccgcatagggtgatgccgagacgtaagaggaccagatgccccgcatcatatcggatcttctgacctcgccgagcacggcctcgtagtcgcccatcgtgccgagtgaaccgcgcctggaggcggtggcgacaacggcttcgtgcagggaatcccgatttatttcgcccgccttcaaacggagcaaagtgtggatgtcgtagtagtcgcggccacgcgtgttggcgattccccgggaaacgacagtctcgagcttttcggccagcacggtttcgagcgggtacgagagcaccctgaccgagccctcctcgaacatcagcgggtagcggtactcgatgcgcccgggcactatctcgtcttcggtcgtgatgtcgatcttcacgggaacgtctatcttgccgtacctcgcgcgcaggtgcgcgcgccagttcgcgtactcgtcgccctcgcggatgggctcgatccgctcgaaggagtattccatgccgtcggcgacgtccacggcgcagatggcggcgacggcctcgctcaccatgccttcgtccatatccatgcctatcaccgtcgtgtccatgtccatggtggtcctctgggcgacgcccgtcatcgaggagatgaggaggccgcccttcagaacgaacgcctcggcgtagccgctctttccgagccgcatcaaaagatgctcgaacaggtacatttgcaggagctcctggggcttcaggttgcttttcttggccaaggccttgattttgcccttgaggcttgcatcacttctcatcatgtgagcacctccaaatacatcctgaactctttctcgacgccgagcgcgttgcacatccgtgcgagcttaggcaggtcggcgcctttccttttgaaataacccgcgaccgcgtcgcggacgagctgggggtccgctccttcggaaactctctgcgaaatgaggtcggctatggcccgttcggcgcaataggctttcacagtaccccctcctggggactttgccttaacgatgccgagctcgtagagctcgggagagagacggtggattttcgtatcgggatattcttgggtaaggccacgcgggttgtagccgtgtgggacggtgacatcgattgcggcgggaaccctgtcggaaaggccggcgaggtacagcgcgcttccgtgtgatagcacgcatttgctccacctgtaggatatcgctgcgaactcgtcatcgaagacttcgggcagacagtacacgccccgggtaagcttgtctatagcgcccgattcaagggcgtaggaaatcgagcccggcagaaagcccgctttcgcgatttgcgccgcgctcgcgatgccgcccgagtcttctacgaattcggctatctcctcacttctgctcataaccctccttttgattattggacacgaattgtagcttaaatgtgtctaataatcaaaaggaagatcatggccatcaggcgaagacgcctggaaagacgctattcctgtaaaaacaaatttaggcccggtgacttgaatcagcggtcgtcccgggccatcgaaacgtatcgtacgcgcccttgttggatttggcaatctcgtgctaagcaccgcaacgctataggattagctggtcaagcagaaagccgtagcgcccgatgctctcgtttttggtgaattcgataagggtcgcagcagataaatcgacatcgtccgggatctcgttttcgacaattatgacctggcagtttccgcattggtcgagcatgtacgaaagcatcgagctcttcatcccttcggcaacgccttcctgcttgctttctttcagggagagaatcggcgagtctcatgtcgaccgaacaaagcagttacgacagcaacatgaaaaagttcggttgggccgattacgccaagccggcgagcatcgacatttacccgaaggatttcgaaagcaagcaaagcgtgatcgatatccttgacaactacaacgaagcgatgaacgccgccggcgaggaagacaaggtcgtaagctacaccgatattgtgggcgcgctcatgagcagcgtaaccaccatcgttaatatgatcagctatgtgctgatggcgttcgtggcgatttcgctcgtggtgagttcaatcatgattggcatcatcacctatatcagtgtgcttgaacgcaagaaagaaattggcgttttgcgctccattggcgcaagcaaaggcgatatcagccgcgtgttcaacgccgaaaccatcatcgtcggtttcgcagccggcgttattggcatcggacttacggctttggcctgcattcccgccaacacgattgtctattcattgttcgatgtggaaaacatcgcgattctgccatggcaagccgcgattgccttgattggcataagcgtactgctcacattcttggcaggcctcattccttcaagcgcagcggcgaaaaaagacccggtcgaagctctgagaagcgaataaggaagcgacggggacttccctaacaaccgctaaaagcaagaagctcgtaactaccacagctgcgagcttcctagcgactatttgaaagagaaggtgcgataaccctgcttcgtgcgctttaagacgaccctcgatccccttgttgctgcagaaggggatgagggtcgtctgttaaatgatcgctaggcaagacccagatccttgcaagctgcgttcgcagcaacatatcccgtcgtgcaagcagcaccctgccccgatcctccatgcagcccatagggatagtcgttaaactgcatggaaccgttatcgatgccgcacacaaacaagcccttgatggggagatcgtcgtgtccgatcgcccgcgcctcataatctcctcgcacgccgccacaggtgctataggcgcaagcctcgacctgaaccgcataaaatggcttcttttctagaggcgtcatgagcgcggggtcggctccaagggggtcatgagagccgtcccccttcgctctattattgtagtcttccatcgttgcagccaatgcttccgagtcaacccccataagctcggcaagctcctcgaagctatcggccttccaaacaaagtcgctgccttcaaccaaggatcggaactctccgctcccaacacccatgaaggcaacgaactcattgagtttatcctcgccctcgtaggcttcaacatgcgcctcatcgaacaaggtaaagaccttcgactgagaagcgattgccgtgttgaggcgggaggtgtcggcgtcttctgcaagtgtctcgttgtaaaagcgcacgccgctctgattgaccatggggagcgttttgcctatttctagcggataccgataagtgggcggccactgagtgaaaatcgacagcatgctactccaactttctccgcacgccttcgaaagtccgtacattaccgcagacggcgcctggggaagcgcgcctgccgtcagcgccatattgataccgtcgccatcttgaccatcgaaccccagaaatacaactcgttcactaggaatgcgaagccgctcggcgcacatttccgggtttttcccgaatccacccgtagcgagcaccgtcgctttggcattaatgcgcacgagatcgccgccgctttttgcgtagacacccccaactccctcattgtcgagaatgatgttcacggcaggagactctaggcgaaaatccaaattatcgagcgtctccccataggcccaaagcggcttgagcataccctcgccgttgtttacccaattgcctgcctcgtcaaagcagctcagaagggcaccctggccaccagttgacatcgaagccccatggcttatggcccaatcgagggcttctccagaattgtccaggtagcaccaaatccctggtgcataagcaccccaattgtgccactgcatgtaagcttcgaactcggcctgcaagtctgtgggcccctgcgcatcaagctgctcttgagtgttgtacgcaagcgtaccctccgttatcgttgaagttcctcccttgagacttgtcttctcaagccagattacacgagcaccaagctcagctgctctaatggcggcataggttccagcggatcctgagccgcacactacgacatcgcactcctccgtgcgggccacatccccttcatccacttcgacaagccgcgaagaaagagggcgatctgcgcccttatgcgtactggtgcccgatgcgtcggtatcagtcgacggcaggccagcatttgaaggagcgcatcccgcgaggccgaccgctgccatgctcgcaccaaatactccacccccaacaataaaatctctgcgcgatatcaccttgtccatttttgatcctcctctttcctaactgagttattgcatgtgcgattttgggctcatgggccatcgcccaactcgtctatcgacaaaacgttgacggcgcctattcgaaatcgcacttacgtatgaaaacgcaggtattggatcttgaggatgcagattgaggttgattgcaggcacggaagggttgaaaaaacggttgatgaagcgcattgcgcacttcaagctattcctcgcctccgcactccacttcctcaaagtgcgattacctcgggttttccaggcttaatcggtataaaatagaccgggaggcagttctatcatacgaaaccattcgggaggtcgaacatggccaaggccgtgacggtaaatcagattcgcaacgtgccttttgctctcgctctggcttttgcttgcgcttggatgctcgacccttctgctgcaattccggcaggattcgcttcactcgtatccttttcccaatacccccatctccttgtaacgtcgctcgcattcggcgtcttggccctgtttcaccgccaaaccagcaccttcctcagcagtaaggcgttcgttgttgcctcctgctcactgtgctttctcggtttttttggcgcctgggcgtgctcattgcagccggaaactttccagggagttctacccttcgcttgtctttgcgtaacggcgctctgccgagcctctctgctcatctcgtgcctcaaggcgcttgcggggctccccctcgtcgactgccttttaacgctcattgcttggcagttttttgtaggcatactgcgggcactctccactttgcttccgccacttgccatatcctgtattgcgcccctcgcaatcgccctctgcctcacgagaaagacctctattgcgctctggcgcgaaaaccctacggctacttcgccctcggaagaggccggcaaaattgagccgcgcagcttctttcccattgcgcgcttgctgctcatttattcgcttatcatcttcaccattcaaacgctacaaggctttgcccccacgcccgtagctagtgtttcctacttcgggctctttatcgccattgcggttacctcaatcgccctcgcggtaaacggaagaatcgttcgcatcaagcagctctatgacgcatcgctcgccattctggaattggcaatcatagttttcgctataggagctgggtgttcctacgaaattgcttcgattcttctcgatgcctcctatatgactttttcgacattcttcttcaccatactgtgcaatctctgccaaagaagaggaaacaacccagtctttgtcttctcgcttgcctatcttgcagagcaactcgccgcttttctaggagaagctttctcgggcatgatagggcctggcgtgcatgcgttgcccctcgtcctactcgcaggattaggagccattgcgttcgtctatctttctcctctcagagatggaagtctcgagaggagcaccgatccagcaaaggcgcagtacgtcgatccggcacgttattacaccatactcgccgaaacctgcacatcggtcgccatgcagtgctctctgactaagcgcgagggagacgtactccttctcctcgcccagagaaaaacgttagcgcaaattagcgacgatctggtggtaagcctcgctacggtgaagacccacgctcacaacatttataaaaaattgggtgtccacagcaaacaggagctgtaccagtttcttggcctggaaaacctatcctattccgccaaatcctccacgaagcccacgcggtagttcttgaagatgacctcgccttcctcctgggtggcgtccaagttcacgtcagcctcgatgcggaagtcgccgtcggcgttctcgcccaggaagatctggcgcacatgccagaggtgctgttcggcttcggggctctcgtcgatggagaggtaggcggccgaccgcgcgtcaccgtccaggcggatctcgttgtgctcggcgaagtagtcgcgggcccagggcacgccctggcagtacagctcgaaggcgcggtccagcagctcctccaggggcttgggataggtgacctcggccagccgctccaggcgttcctcgtattccacgccgtcggccttcatggcggccatggcggcgtcgcgggccttgcgctcctgggcccgcagcaccttcgcgggattctccagcgtggcctccacgagcgagatgacgtccagagcgtaggtgtcgctctccgggtccagcagatcgagcgccgccagcaaaaacggcgagagcggctggtcgagggcgaagtcctcgggaaggtccacggtgagcacgtagctcgggttgccctcggcgtcggtctcgcgcactaccacgcccgcttccagcagcgtgccgaaaatctcgtcggcccgggcgttcagcttgattttctcctcgggggtctgggccgagtcggcaataagctggtgcacgttggcccacgcgtcgcctccgcggctcaccaccgacagcaccatggagtgggtgatgcgcatgcggggcgtcagcttctccggcggcttttcgattaggtgctcgaaggtctgcttgttccagctcacgaagccctcgggcggctgcttcttcttcacgcagcgctgctttttcgggtcgtccccggccttcagcagggccttgtggttctcgatctcgtgctcgggggccagcgcgatggccattccctcggtgtcgaagccggcccggcccgcccggcccacgatctggtggaactcgcggctgcgcaggcggcgcatcttggtgccgtcgaacttggtgagctgggtgagcactacggtgtggatgggcacgttgatgcccacgcccagggtgtcggtgccgcagatgacgggcaggagcccctgctgggccaggcgctccaccaaaagccggtagcgcggcgcatgcccgcgtggtgcacgcccacgcccgccgccagcagccgctgcaggatcttgccgaagggggtggtgaacttcgtgcccttcatggcttgtttgatggcctcacgctggtctttctccgatacgccgtagctggccagcgaccgggcgttcttcagggcctcgtcctgggagaagtgcacgatgtacagcggcgcctcgccggcgcgcaggcccagctccaccgtggcctccagagtctccagggtgtagtcgtaggacagcggcaccgggcgcggcgcgtcggtcacgaggtccacggggcgccccgtgcgctcctggagcatggcggcgatgtcactcacgtcgccgagggtggcgctcatcagcaggaactgtgcaccggtcagggtgagcagcgacacctgccaggcccagccgcggtcggggtcggcgtagaagtggaactcgtccatcacgacgcagcccacctttgaggctggtccctcgcgcagggcctggttcgcgagaatctccgccgtgcagcagatgacgggcgcctcggtgttgatggtggagtctccggtgatcatgcccacgttctcgcgccccaagatgtccaccatatcgaagaacttctcggacatgagcgccttgatgggggcggtgtagtaggcggtgcgccccgtggcatgaggaataatcgaacagaaagcgtttccgcaggtaaaagatgcgaaacacttgcaaaccgcgttgggtagcgtcccgaaagttggtgtatcaatccgtttctggagggcgggcgaagcctgcccgagaaaaacggacatcgtctagaatcgtcaatcaccacaaaagacagattcgaaggaaggcgatgcccgctatggacactctactattcaacgaccccgaagtgaaggggctcgcgttcgcgatcctcgaggaatgcaccgacctgcaggccttcgggcgcaggatgctcgagctcctggcgaacgccgcgatgtcggcgaaggccgacgaggcgtgcaacgccccctacggggagcgcgacgaggggcgcgtcaactcgcgcaacggctaccgggagcgggggctctcgaccgccgcgggcgacgtcaccctcaagattccgaagctgcgccgaggctcgttcttccccgaggacctgatcgagcgctactgcagggtggaccgggcgctcgtcgcggcggtggccgagatgtacgtcatggggatatcgacgcgcaaggtggaggccgtcgcgggcgagctcggcgtgaggtcgatgtcgaagtcgcaggtgtcgcgcctgtgcgagtgcctggacgccgaggtggacgcgttcaggaggcagcgcttcgacggggtgcgcttcgcctacctgtggctcgacgccacctacgtgaagtgccgcgtggaggggcgctcggcgtcccaggccgtcgtgaccgcgatcgggctcgacgacacgggccacaagcgcttcgtcggcgtggactgcgtggacacggagagccacgccgggtggaaggcgttcctctccggcctgagggcgcgcggcgtcgacggcgtgcgcctcgtcgtctcggacgcccacgaagggctcgcgaaggcgatagccgagacgttccaaggagcggcctggcagcgctgcgtcacgcacctcatgcgcaacgtggcgggccgcatccacaggaaggacgaccagagaaaggcgcgcgaggccatgaaggccgtcttcgcgcagaagagccccgtcctcgtgcgggcgtgctaccaagaggcgaccgaggaggtgctgaagatctcgagggcggccggaaacgtgctcttggaggccgaggaggcggcgctcgcctacctggcgttcccggccacgcaccgcaccaagatccgcaccaacaacgtccaggagagggccaaccgcgagatcaagcgcaggacgcgcgtcgtgcaggggttcccctcgcgcgagtcgctcatccgcctggtgggagcggcgctcatcgaggccgacgaggagtggtcggcgcgctgcgtcatctccaggccctcgctcgcgcacgcctggaaggcccaggagcgcgaggcccccggcgaggccgaggtgctcgccgcccgcgaggcggcgcgcaagatcatagggagcgccattgacccgaaggaggacgaaggctaagattcacctcgcaagggtgccggcgattctccggcgatggccctgatacaccacgattcgggacgcggccccgcgttgtttcttggtgacattctttgtcaccgatgacgccatttttctgtaatacaagcagtttatttgagcgtaaaaccaaaaggaaaaccctcctgagctggtgttttcaggagggttctgcttgtcacaaaccgatacgttactgtatcgctatttattcccactcaataagattaatttgacctggatgcattggagtgcggctagtgacgtttcatgtcgtgcagtgaaccagaattgccgaaaatggccgattcggatggtctcaaagtggtctcatccgtttttgccaggcagttcaaatttcgccgaaaagtggtctcaactcgcatgtacggagttgagaccaaaatcgacctcgaaaacagggttgagaccattttgagaccaccttgggcaaatcagcggttttcccggaaatcccgtttggtctcaaccggtctgtgctcacgtctcccgtatgccctgttttacccgggtggcttgcaggtgttccgagttaacgaaaccaagagttgaaatcgacgtttccgcaggtaatcgggcataaggaaacccccttcgcttagctctgcaaagagggtttcgttgagaccgtttgatagaagttccggtggctttcatccactccgaaccactcggaaccacccggaatatctgggtgctcgggggtaaaaatacctctaaattattcccactcgatggcgtcggttcttccgtcccgtcactccagttacacccagttttcggcatcgacacggaacgcgtgccgccgaatgacgcgatgtcgcgtttcgtcggcttcggggacaaaagctgggacaacctcaaaaacttttttcaaactcagggctttgagtttttgtttttgtcccaaagtgcgcggcgggtcgcctttggatgctcgatggcgccgaaaacgcccgttttgaaactcaaccgcccttttgcccgcaagccgccagctgcaatcgcaagtgaattaacgcgggtggcttgcgcgccatttgcaaaaccccaggtcgcaggtcttcgccattcgtgaacaaagtgagtagtctcaggtggcttgcttatgagttggcgaacgggccttcaggattcagggcaaacatgctggtagaataggattctcaaatcaatgacaggagaccgagcatggccgaaccccacgataggaagccgatcctcacgatcgagcagcagatagagcacctcaagcagaagggcgtagccttcgaactgtgttccgaggaagaggccgcggactacctgcgcgacaagtgcaacttcttcaagctcgcatcctaccgcaaactcttctcgaaatacgagggaggcccgcgcgacggccgctacgtagacctcgacttcggccagctgcgcctgctcgcggcgctcgaccaggagctgcgccacgccctgctcggcatgacgctcgacatcgagcatttccagaaggtgacactgcttcgcgagatggaggaccgtggagaggacggctacgccatcgtggccgactacatggcatcgcttaccactgcaaacagggagtaccgcctgcgcgagctcaagatgagcggccgcagcccctacagctcgagcctctacgcgaagtactccggcgacatgcctgcctgggccttccttgagctcacctcgttcggcaccctcatcgacttcgtgcgcttctgcgccaggcgatggggcgacaggcgcctcgaggcctcccactacgacctcaagcgcgtgaagtccgtccgcaactgcgccgcgcacggctcgtgcctgatcaactgcttcgccgagaggggcgccgcccggggctcggcgtccagcggcgtctcccgaagggtcgccgccgtggggattcccaaggcgaccaggaggaagtggatggggaatacggccatgcaggaggtcgcgaccgtgctcgtggcgcactccggcttggtacccgagggctcctcgcgctcgcgcgccgcatccgagctcgccgagatgttcgccagggccgacggcgaaaccgaggcgctgcccgacaaggggcccgacgccgcagctcgctccgcgctcgagttccttcgcaggttgacagaatcgctcgggttggtagaatagcctgcagatagcaaaaccttcacggttttaggggcggacttgcgcaagcgactctgccctatttttatattcactcgctataggagacggatgatacctgggtcaatgacagaactgagaagcccggaataatggagccagttagaaaccctcgggtttgcggggcgggatcgtgagagcgattctgccctatttttttcctccgtctgccccaaccaagtagttcgaagatagcctgtaggtgtcctcgtgggcgccttttattttcagggaatcggccgcttcatgaacgagcgaccggcttgacctagacgaaccgccttcatctccgtctaggcgccggcaatcaacatcgtgaatccgcgcgtgctacaatgcgggcaccagagatgaaaacacagtccccgtcgggtagtcgtgggcgtgcgggagtccgcatcagtaacctgcctccttggttgtcccttctctgcatggtcatctacataaaggaggaaccagccatgcagatcagcgtgtcgtccaccctgaccgtatatcacgacggccaattctgggtcgggctggcggagcatgtcgaggacggcaggtacggcgtcgcccgcatcgtcttcggcgcagaaccgtccgatgaggagatcctgcgattcgttacaagcaaatgggcgaagctcgcgttcttcggtgacgatccgtccgaggcgagcgagcccgcgaagaaccccaagagacgcgcccgcgaggcggcgaaagccctcaagcagccggcgatgagcaccaaggcgcagcaggcgctcgcgaatcagcgggagacgatgaagcgggaatcggctcaagcaagaagccagcgtcgagcggatgaggcggaggcgcgcttcgagcagcgaaaactgaagcgcaaacagaagcatcgcggtcattgataccaccatcaacccatatatagcagcaggcgtagcttcgattgaaactacgcctgccacctggtgctataacgttatacagaacgtatgttctatacccactcgatgactaacccagtccgagcactaccgatgcgtgtcgcgtcataccgcctaagagctgattcgttcagaaaaggttcagggggatcgtcgagtttattgcaccctcgcgttttacaaaagagagtacaaggccctttagctcgaattattgcatttagaaccccgccgctcatccatcctagcttgcccaaacagccctcccgcgatgtccatgttccaacggatgggtaccatttacccgggtgcacctggggcaacgggccggcaggcccgcgcaaggtcgctcgcataacacacaacatcaaacacgacagaagaggcgaacgacagatgccggaccccggacgacagcaccgcggaagagaagcattccaaccacaaccgaacgaacatcgctcctaggcaggcgcccgcatgggcgccttttacttttcagggacttagctgagagctaagccacgcggctcatggccgtttcgtggaggcccgaccagctcgacccacctcgacccgtctccgttcccgtcatgcgcgcgatgcgccagcaggcggttcaatcgtcgcgcagacgaaaagggacactgtgccgcgcggtgtgcccgcacggtgccgcacgggaagattggaggaaccatggcacgcacagccgaatgcgccgctcccgagaacaaccagggccgcgacgaatggatgacggtgatcgagatgcagcagtacatgagggcgagccgaaacaaggcgtacgacctcatctggtcgggagagatcgactcgtacaggctcggcaggaagctcctggtttcgagggcgtcagtggacgcctacatcgagtcaaggagcggcaggaaatgacggcggcgaccgccccgggagccgcccgcggccgggcacgcgagggagcctcgagacgaaaggagctcgaggacgaccatgaccaagagcactagcaggagccaggtgaggctcatcgcatcgacaaacgcgatattcggcgccgacgaggcgtgcgcgatgctgcgcatcagccgcgacgccatgtaccggctcgccaaggaccgcgacgacccgttcccgatccgctacatcggcggcaagacgcgcgacggcatcgtgctgcacgacgagctcgtcgcatgggtcgagcgcaacagcgtcgtcggctcgccaagaaggggctagcgccatggcggccgcaggcccgagggggcgcgacggcccctccccgcgcgagttcgcgacggtacggcacttcatgatggcggacctcggcctctcaggccttcccctgctcgtctacgcgcgcatcttcggcttctgcgacgccgggtgcggctacttcgagagcaagggcggcctggcccgattcctcaacgtgcaggagcgcagcgtccaccgcgccatccgcaacctgctcgaccagggcctcatcgaggagtgcggcgtgcacgccccggcgcgcgggcatgccaccaagcgataccgcatcgtgcgcgagaggctgccgcccggagcgttggcaacccctgacgattcgtcagggttcccggcgcgaaagggtgacgaaatgacagggttcgccgcgaacaaggatgacgaaccgtcagggctcgcagcccgaacccctgacgaaatgacagggaaacccctgacgatatgccacccaataagcaaaagggacaacaaggacttcagaagataaggaaggggcgcccgatggaccgagcgggactcatcaccctggagcaggcccgggccgccgggctctccttcgacgagccggagccgagggcgtgcccgcactgcggcgccgccctcgaaccgctcggcgcagcgctggcgggcagggtcgcctgggtctccagcgccccctgcccgtgcgagggcgcaaccagcgagcgggaggccgaggcgcgaaggcgcgcggccctcgccgccaaggaggaggccgcccgccgggagaaggcgctcgcgcgcgcgggcatccccaggcgctactgggccgccgaggccgaccgccccgagttcgccgagtacatcgcctcgttcgccggcaacggaggcgccgggctctacatacacgggggcgtcggcgccggaaagacgcacgccgcctccgccatggccaggctgttcgccgaggccggctacgacgtcgccttcacgacggccaagggcatgctcgagcgcgtgaaggccacgttcgacgagggcggcaccgaggcggccgtcgcgcggtacgccaagtgcgacgtcctcgtgctcgacgacctcggcaaggaggacgcgacggaatggtccgtcggcaccgtgttcagcgtgctcgacgcgcgctacgaggacatgcgcccgaccatcgtcacgtcgaactacgcgccgggcgcgctggcggacaggctcgcgaggcgcggcgagcgcgtaacggcagaggcgatcgcgagcaggatctcccagacctgcaggcccgtctacctgggcggaagggacaggcgccggctcggctagcttgtgcgcttcccgtggaggcgcggacggctcgacccagctcgacccatcgcgggcggccccggtcgccgccgcaatcgaaatcgctatacacgtcttgggcggcgccgacgcgccggcacgcacgcctgctccgactcgcaccgtgcccccatcgcgaggacgccgcccgccaaacaacaaacgaaaggcggagggcccatggacggcttcgagaggataaccggccgcgagcacgacgggctcgtggagaagtgccaggagaacggctggctcaaggtcggcggcttcgactggcaggacgacccgttcctcgaggagtacccctacgagttctcccgcacggacagcgtcgacaggctccgcgaggcgctcggctcgggcaactgggccatacgccaggggttctgctaccgcgacctcgcgttcatccagcaggtgaacggcggcgacgagtggtggacgctcaagcgcgacggcgacgcgtggaccggcttcgagagctggagcttcggcgccatcgcccaggagcccgagcggttcgagcgcgccatgcgcgacatgtgcgaggcgacgccggagcagtgccgcagcggcgagtgggcccatctgcacgagaaggctcccgagccgctggcgcagcgcgccgcgtccgcccgcgaggcgagccgcgcgcacgccgggcaggaagcccgcgccccaatggcgcgcgagagggccgtcggggccgaatagggacgaccggggcgcgaaggcgccctttttcatctcgactggaagggaggcgcgggatggcgagcgactacggggacgaggcgggcggcaagctgctcgactggatgctgagaatcggccaggaggccggcgccgaggcaatggcgcgcagcgcgagggagctctccgagcgcctcgcgggaatccgcgggaccatcgccggcgggcgcgccgaggccatcgcggccgacggcgcgccgacctacgcgaagctcagcctcgaggagctctctgggcttcccgagtacgcgacgatcaaggaggtcgtctccgacaagctgcgcgccgcgtcggtcgagcaccacatcatccccggcgagggccgcgactggctgctcttcaaggtggaggacgcccccgaggtcgacgaggccttccgccagctggagcaagagacgggcaaggccgccgatcgcgcaagggagcggctctccgagatagccgaaaggcgccaggcgcccgagcggctggcggagcgcgccgagcgggcgcgcgaggcgtcgagggcccacagccagggcatcggccgggaccgcggcccgcgccagatcgaggggcccgagagatgaggtggcaggcggcggccgcgctggccgcggcggcgttcgccgcgggagacttcgcggccgcggcaatcgcggcgtcgggcgcgaacccgatcctcgacccggaggccgccatggcggcgatccccgcggcgctccgcgcggggcgcgtcttctccgcggaggcggttcccctgtgcgccgggaccgcctgcgcgtgcggcgcgctcctcgcctgggcccgctcactggggaccaagggggcccggcgcgacggcgaggagcacggtagctccaggtgggccacgcgcaaggacatcgcgcccttcggcgaccccaaggaccccgacaacaacatcatcctcaccgacaacgcacgcatccgcctcgtgagccgcaggttcgacctctccaccgacaccaacgacaacgtgctcgtggtgggaggacccggcaccggcaagacgcgctactacgtcaagccgaacctcctgcaggccaacgccagcttcttcgtgaccgacccgaagggcacgctcatccgcgagatgggcggcgcgctggcggagctcggctacgagatccgcgcgttcgacaccatcgacttcacgcgctccatgcgcttcaaccccatagcctacatacgcgacgaggcgggcgtcatccgcttcgcccgcggcatcgtcgccaacaccgagggcgaggccgaccacaaaggcgacccctactgggagaaggccgagcgcctggtctacaccgcgctcacggcctacctcgtcatgcactgcgagcccgccgaccgaaacctcgacgggctgctcacgctgctctcgctcgccgacgcccgcgacgacccgggctacatgagcccgctcgacatggtgttccgcgagctggagaccggcgagcgctacgtcaggcgcggcggcgcctcggcggagggcggatcgctgcgcggcttttccgaggaggacggcgcgtgggagtgggtcaaggtccgcgagcccgcgccgcccgacgacttcgcgctcgcgagctaccgcgagttccgcgtggccgccggcgacaccatgaagtcgatgctctcgagctgcaacgtccgcctgaagccgctttccatccgcgccgtgcgcgacctcacctccaaagacgagctcgacctcgcccacatgggcgacgagggcgccaaggtcgcgctcttcgcgtctatgagcgacaccgactcgaccttcgacttcctgttcgccctgctcatggatacggccgtgagcgcgctttgcgccgaggcgctcgaggcgcacggcggctcgctgcccacaacggtgcacttcgtcttcgacgagttcgccaacatcgggcgcatacccgacttcgagcggaccatcgccgtcacccgcagccggaacatcgccgtctcgatgatcgcccagtctctctcgcagctgaaggagacctacggcgacaacaacgccgagaccatcgtgaacgcctgcgacacgctgctctacctgggcggaaaggcgaacgagaccaacgaggagatcagcaagatggccggcaaacagacggtggcgagcgagacgcagagcgactcgcggggcgccggctggacccggaccgtgaaccgcggcatctccgagcgcgacctcatacagcccgccgaggtggcgcgcatgccgcgcgaggacgcgctcgtgctcgtgaacgggtgcatgccgctcatggaccggaagtaccggctcgagcgccacccgcgctcgcgcctgctcgaggaggccgcgcgccgcggcccgttcgacttcgcggagtaccgcaggcagaaggaaggcaactcgtgacggggccgcggcgggcgcgggcctcccccgccgcgggggaggaacagcaaggaacatcgtcaaccgaaagcaaaggagagcagcatgctcgcaaacgtcatcaagctcgtgtcgggctgcgtgaccttcctcggcggcttcctggtcgtgtggggagcggtctcgctcggcctggccatcagggagcagcagggcggcccgcagatcgcgaccgccatatccaccatcgccggcggcgcgatcatcatcgccgcgtcggtctacttcggtcagctggacacgtcctggctgccggcatagggggcgtcgcggatggcgctcaggataccggtgcagaaggacatcggcgagtacgaggagaagatcgtcgggaagatgagcctgcgcacgctcgcatgcgtgtcgctcggcttcggcagcgcggtcggggcggcggccttcgtccacctgggcctgcacgccgacgtcgcggacgcggccttcccgatcatgctctgcagcatgccgttctggctcgccgggttctggcggcccttcggcatgcgcgccgaggagctgctgccgcttttggcggcacacgagctctccccacagctgctcgcgtacgagccctgcctcgccgggagcctccccgagggctcgccgcgcccgggccgcccgggacgtcgcgcgaggcgcagggcaaggaagaaaggagccgagctctatgagccgagcaagaagcaacaaggagaataggccgaagcgcccgagcaccctcgggctgctcctcggcggcacgggcgggcgcaaggacgcctcgaagggcgcggaggccgagcggcagaggcgccgccgggagcgcgaccgctcgcgcgagatggccgcctacgtcggctacgacgccatgtacaaggacggaatcgcccaggtgatgcccggggtgttcagccagacggtcgagttctccgacatcagctaccagtccgcgcgcaaggaggcgcgcgagacggccttcaccgtgatgagctcgctgttcaactacttcccggcggactcccacgtgcagctccaggtagtgaacgcgcccatccccgccgacgaggtcggccgcaaggtcttcttcgagcccggggagcgcgccaccgccgggctcgccgaagagtacaaccggatcctcaacgacaagatgcgcgagggcgtctcgaacctcgtgcgccaccgctacctgacctacgccgtgggcgccgacgacgtcgacgccgcggtgcccaagctcgcgcgcatccggggcgacgtggaacagacgctcgcgcgcatacgctgctcgtcgcgcgccctcgacggcgtcgagaggctcgagcttctgcaggggcagctgcgcccggggtcgcgcttcgagttctcctgggacaaattgtccccggcgtcgggagcgcgcacgaaggacttcgtcatgccctccacgctcgacttcaagcccgaaggcaggtccgactgcttccgcagcgacgagcgctacggcgcggtgctcgcggtgcgcagcttcgggtcggtcatcgaggagacctacctcgcctccatcatcgacctgccgctgccgctcaacgtgacgctgcacgtgcagcccatcgcgcagagcgaggcgctcgcgctcgtgaagcgccagatcgactggatggacaaggagatcatcgacgagcagatgagcgccgtgaagaagggctacgactaccagatcctgccgcccgagctgcgcttctcgaaggaggaggccgaggagctgctcgacttcctgcgcaacaagtccgagcgcctgttcgtctacacaggcctcgtctacacctgggccgacagcctcgaggagctcgaccgccgcgtccagcaggtgacgagcgtcgcgcagggctgcacgatcggcctcgagccgctccacttccggcagcgccaggctctcaactcggtgctcccgctcggtgacaaccacgtcaccgtgagccgctacctcaccacggggcaggtggccatgcagatgcccttcgccagccagagcctcgacgaggcgggcggaggctactatgggcagtccaaggagagcgggaacctggtgctgtgcgaccgcaagcgcttggcgagtcccatgggcttcgtgtgcggcaagcccggctcgggcaaaagcttctcggtgaagcgcgagataaccaacaccgtgctcgcgcaccccgaggacgaggtcgtgatcttcgacccggccggcgagtacggcaacctcgtcggcgcgctcggcggcgcgaacgtcgagctcgccccgggatgctcggcggtgctcaaccccctcgacaccgccgacgtcgcggaccgcgccgacgccgccaagctcgcgtacaagaccgacgcggtgctcgcgctctcgagcgcgctcatggccgagggccgcgagggcctgccggagcgcgaccgctcgatcatcgcccgctgcgtcggcgaggcgtaccgggagtgcgcgaaggacggccgcctgcccacgctcggcgacttccacgcggcgctgctcgctcagcccgagcccgaggccgccgacatcgcgctgcgctacgagcgctacgtgaagggcgcgttctccttcttcaacggccagagcaacgtggcgctcgacaaccgcatcaccaacatcgacatgcacggcctcggccagaacatgcgcgtgttcggcatgatcacggcgctcgagatggtgcgcaaccgcgtgatggtcacgccgccgcgccccaactacacctggctctacatcgacgaggtgcagagcctcttcgcgcacccgacggtggtcgagtacttcgcccgcctgtggcgcgaaggacgcaagttcggcctcatctgcaccggcatcagccagaacacgagccacatgctggccaacgccgaggcccgcgacatggtgctcaactccgagttcttcctgctgcacaagcagtccaccgccgacctcgacgcatgggcggagatgctccagctctccgccacggagcgcggctacatcggcgacgccgtcaagcccggcgagggcctgctcatcagcgccgggatccgcgtgcccatcaccgacgacttcccgaggggctcgctctacgacctgtggaacaccaagcccgcagaggtcgccgagcgcgagatgcgccgggcggcgcgagaggcggaggaataggaatggccggcccgagcgagggcggcgggatgctcgaggtggtaggggcgcggcgccgcgacgtgctcaccgcgggcgacgtcgcggagaccgagcgcgacgccctgggaaacgtctcggagggtgccggcccgctcgacgaggcaggaggccccgccgcagcggcgaaggggcgcccttccaggcccgacgcgccggaaggcgggctcggggacaaattgtcccaaccagccggcgaccggcgcgcggcggccgcgatgcgctcgcgcgtcgatgcggcgaagctggcgatcgcccgggaggccgtctcccagctcgacgactcggaggagctcgagggcgtctcgggcatgtacgacgcggggcgtgcggccaagaaggccgcgggagggctgcggcggaggaaggcgaaggaagcagcccaaggcagccgcaaggcggcgaccgccctcggcgccccaaagggaggcgcgcgcggccccgaggcagccggcgcgaccgccccggccaagcatcaagcggcccaggcggccgcgcaggcgtcgggcgaggcggcccgagccgcggggtcgaagggcgccgcctccgcgatcgcgggcgcggtctcgggcgccgcgcccgccctgctcggggcggtggccgggattatggccttcgtcgcatgcgcgctcgccgtcgcgcagctgctgagcgcgctgttcggcttctgggacgacgcggcctccaagcggggcctcgaggggctgccgccctacatcacctacgagatggtcgaggcggcgctcgagtgccaggaggagtacgggcacccggcgggctgcaccatcgcgcagatcatccaggagtccggccagggcgaccgcatgagccagctcgcagagcgcgaccacaacctcttcggcatgaagtggtggtcgggctacgcgggctgccccgaggtggccggcaaggcgaactgggccaccagcgaggaatacgtgcccggcgagcacacccagatcacggcgagcttcatccgcttcaccggcgacgccgagtgcatccgcttccgcagcagggtcttcctgcaggcggagcgctactcgggcaacgccctcatccgcgaggcgatcgagaggcacgactcggacaggatggccgaggggctcaaggacgccggctgggcgaccgactcgtcctacgtcgagtccctgaagtcgatcatggcgcaatggggcctctaccggctcgactccatgacggtcgaggacctgaaggactcgaccgcgaacgggaacgcgatcgtcgaggcggcgtacagccagctcggcgtgccctacgtctggggaggctcgacccccggcaaggcgctcgactgcagtgggctcacgcagtactgctacgcgcaggcgggcatccgcataagccactacacgggttcccagtacgaggagctcaggcgcataccgctctcggaggcgaagcccggcgacatcctctaccgctcgggccacgtggccatctacatcggcgacgacaggtacatacacgagccgcgaacgggcgacgtgtgccgcatagcgagcggcatcggcagcttcagctgcgcgctcaccgcgagataggagaaaccaatgcagggaaagtcaagggtcatggccgccgtcgcggcaggcgcgctcgtcgtggcgctcggcgcgggcgcggcgcgctgcgccatcgccccgcaggaaggcgcgcaggatagtccccaggagcaagagcagcccgcggctgcaggcgccgacgcggcaaccgggaaggccgcctcgggcgccgaggcgctctggaacaccgtatggacgggcgccgacgacccgacagccacgctgcggatcgtcgagggcgccatggtggagagctcaggcggcaccgagcgcgcctggttcttctcggccgaggagccctccgaggccggcggcgtgctcagcgtgcccatcgacgtcaagggaaccaatgagaagccgggaggcctctcgctcatccaggtctcgggcgacggggacgcccgcaccctggcctgcgacctcctgacgcaggcgtacacgccccagaaggtgcgcggcggcgcgttctccgtgaccggcaccgacgaccgcctctccgaggcgttgggcgcagactcggccgacatcgaagacatcgtcgccaggaaggcggcggaggtgtccccgcaggcggcgggtgcctcctgggacaaagaggtgtggctcgactacgccgggaacgtcgcgtcgacgaccttcacgctcgacgaccccgcctcgacggtggtcaccgtggtctcgcgcggcggctcgctggaggcgatgtagccatgggggcgctcaaggcgcgacgccgaagggcgttcgccatctccgccgcgacggcgttcgccctctgcgcgctcctgctcgtccccgtgcagccggcatacgccgacatagccggggacgtcaacgattggctgtgcggccttctgcgcgactgctgcaactggatgttcaaggcgcaaacgggcgtgctcgggtcgatcggcgcgaacgggatcctctcggccgacttcgcgcacatgctcacgagctcgagcgacctgaccatgcacgacgtcgcccggggcgtatggcaggttgccatcctgccgatcgggtgcggggtgctcggcctggtcttcaccctgaagctcatcgagatctcccagcgcatggacggcagccagagccttcccggcgtcaaggaggtcgttttccttctcgtgttctttgccgtgttcctgttcctcatacagaacagcttcgacctgatggcgtcgatctacgaagtctgcgggctcgccatcgaccgagtcgaggcgctcttcggcgccggaggcgcgctcgacctgcccgaggtgtccgtcgtcaccaccgacgacgacatcccgtcgctcatcgccatgctcgtcgtgagcctcatcagctgggtcgtggtgctggcggcctacgtcgtcgccctcgtggtctgctgggcccgcgcgctccagctctacatcatggccgcgttcgccccgatcccgctggcgttcctcggcatggacgccacgcgccagataggccttggctacctgaagagcttcggggcggtctgcatcgccggcgtcatcatcctcgtgctactcatatcgttcccgctcgtgctcggcgggctcaccggggcgaaccccgggacgggtaccccggccgacgcggtcgcgaacgggctcacctacgcgctgcagtacctggccatgtgcgtgctgctcatcctggccctcgtgaaaagcggctcctgggcgcgcgacatcgtgagcggcttctagcggaaaagcgaggaagggggcggtcgccatgagataggggcaccgcgccggggcacgcgtcccggcggatgaagacaaggaccgattgaaaacgaaaaggaggaaagacatggaagagaggaagaacgtgtacctctcgctgcacaagagcttcgtgcgcgagggcatcgagtacaccgaccgcgcgaccggcgaggccaggaccttcaactcggcgacccttcccaagggcaccgtcgtcgacggcatggacgtgggaggctacgagttcagccccatgttcgttaacgagagccgcttcaagggggccgacttccgagacataccgctgctcgcgaaccgcgaggtgtggctgaggaagacggtgatgggcccggacggccggcccgagctcgacgaggacggacgcacggtcaaggacaccgtgaaggtcatgccggcgcagctcaaggaggccgttgacgcagggcgctcgcgctacctcgcggagcgcgccgagcacgcccgccaggcgagccgcgccgccgagcacgaggcgccccgcgcacagcgaagcgtcgagagatagggaggcggaaagatgaacgcagcgaaagactgcaccctgcaggaaaagctcctccgatgcgccatggcgctcatcctggcggcgggggctctgctcgcctctgtggcggcctcgcccgcctacgccgcgccgagcacggtagacgtgtccatcggcggcaagatcccctacggcggcttcgccaccacgtggatgagcgccgacggcaacatcgcctactgcgccgagccctcgtccccgacgcccgcgccgggctcctactcgacgagccccgtgccgagcggcgacgtgacagcggcgatctggtactcgttcggctctcccggcttcgacgcgtcgatgttcccgggcagctggtacgacggcggcggctgggacgacgccaagtacgcggcggcgagccatgtgctcatcgcctacgcctactctgggtccgagtcggctgccacgcacggcacgagcgccgagttcgcctcctgggcgaaatccgagctgatcggcgggaccttcgccaagatgaaggcgggcgccggcaaggtatccgccgggttcgaggcgttctgcgtcaggaccggcggcggctcccagacgctcgtgagcttcagctggtccgcaggcggagtcaaggtcgccaaaacggactccgaggcgggcgcggagccccagggcgacgcctcgctcgacggcgcgagcttcttcgtcgttaacgagaccggccgctacgtgctggtcggcggcaagtactacgccgacggtgaggtatgcgccacgataaagaccgcgcccgaggacgggtcgcacgtcgccgcgaccggcgccgacgcgcttcccgcgggcaattaccgcatcgtcgagtccggcgcgcccgagggctacgacgccagcgacgtccccgtcgcgttcaccgtgaaggccggcgaggtgtgcgacctcacgggcgaccccgtgaccgacgaggtcttccgcggcggcgtgcaggtgaccaagtccgacaaggagctgcaggcgtccgaggcgctcgcgggcagcggccacaaggaggcgcctggcgagcaccccggcctcgacgggatcgagttcaccgtcacgaaccgctcggcgcacaaggtcctcgttgacggcgagtggcgcgagccgggcgaggccgtggccacgctgaccaccgcatggaacgacgaggccggcgcctacaccgcgcagaccgcggccaacgcactgccgtacggaacctacgacgtgcgggagacggcgacgaacgggagctacctgctgaccgacggcgagccccgcacctttgaggtccgcaccggcgacgagatcgtgagcgcctccgcggacggcgccgcgctcgagttccgcgaccaggtggtgcgcaacgacctcgagctctccaagaagagcgagtccgacaacgccggcctcatggttccgttcgccatcgagaacgcggccaccggcgagattcacgtgctggtcacggaccgcaacggcgacgcgtcgaccgcgagcagctggaacaagcactcgagggacaccaacgccaacgacgccctgctcggccatgagggcccgattgctgccgccgacatggacccgaaggccggcatctggttctcgctcggcgaggacggctcctcggcgccggtcgacgactcgctggcggccctgccgtacggcgcctacaccatgaccgagctgcgctgcgatgccaacgagggcctcgagctcatcacgagaagcttctggatcgatcgcgactcgacggtcgcgaaggccgtgtggatgggccttgacgaccaggagggcccgcgcatctccaccacggcaaaggacggggcggacggcgacaaggacgtctcggccgacgccgaggccaaggtcgtcgacgccgtcgcctacgagggcctgaaggccggcgaggagtacgagctctcggccaccctcgtcgacaaggcgaccggcgagcccgtgaccgacgtctcgggcatgcccgtggaggccaaggccgagttcgcccccgcgctctcgacgggcaaccaggacgtcgagatctccttcgacgcgagcctgctcggcggccgcgacctggtcgtgttcgagagcctacgcaaggacggagccgaggtggcgtcgcacgcggacctctccgacgagggccagacagtccacgtcgccgtcgaggtaagcacgcaggcggctgacgccgccgacggcgaccaggtcatcgaggccggcaaggccaaggtcgtcgacgcggtggcctacaagggcctcgtccccggcgagacctacatcgccgtgggcacgctcatggacaagggcaccggagagccgttcctcgacaaggacggcaacgaggtgaccgcgcgcacgcccttcgagcccgaggcgccctccggcaccgtcgaggtgaccttcgagttcgacaccgagggcctggccgagggagacgagctcgtcgtcttcgagaaggtcctggactccgccggcaacgtcgttgcaacccacgaggacatcgactccgccgagcagagcgtcgtcgtggacaaccccgacacgcccgaggtccccgaggagccctacgccaagaccggggccgacgcccccgacggcaccggctacgccgtggccgcgggcatcgctctggcagctgcggcgggtgcgggcggagcgctcgcgtaccgcaagcgcaagacggccggcgcaagcaaggacacggcagccgaagagcctgccgaagagccggaagagtagcggcgccgcatcgataccgaaccggaggccctgggcgctcgcccggggcctcccctgcgaacgggggaggacatgaacaaagggaaagctgccacggcgctcgccattgccgtggcgttgctggcgatgggggcgctcgccgtcctgccgctgcccgagaggaacccgtacgaggtgcacgaggtgcctactgcggaagaggacgcgacaatggaggctcaagagacgggaggcggcatcgactgggacgcccttcccgcctccgtcgtcgcttgggtgcgcgtgccgggcacgaccgtcgactacccgatcgtccagggccggactgaatcgcccgacttctacctcacgcacgacgccggcggcgaaagatccgcgtggggcgctccctacatagacgccgggtgcgcgcagggcgccgagagcccgctcgtcatcgtctacgggcaccacatgtccgacggcaccatgttcgcgccgctcgcgcagtactcgtcgcgcgacttcgccgaggggcaccgcaccatccgggtctacacccgcgagaaggcgatcgagctcgaggtcttcgcggccgacgtggtcgacgcgagctcggagggcaagcggaccgacttcgcagacgcggcggcgctcgccgcctacctcggggacaaattgtcccggtgcgaggtcgtcctggaagagccttcggacgtcgcgcaggcctgggccttcgtgacgtgcagctaccagacgagcaactcgcgcaccgtcgtctacgcgaaggaggtggaaggatgggattcgcgcccttcggaatagggctcctcatggggctcctcacgctcacggcctacgcctgctgcgcagccggcgatgacgaccgggactagctgccgaaaaacgaaatcgcaaccgaacagaacgatcaagcccctcgctccgatggtcggacgaggggcttgcgcatagtgggataatgaagagcgagtgagacgcgtcgtgtgtgccgtgttgcatcggttgcgcacgagcgccttacataaggttcgtttacgtcaggagatacagaatggcgctcaagttcgatctcggggaagctctgtcccaagctgcccacgccgcaggagagatggcaaaaggcgcatcggcgaccgtcgagtccgccgccaagggcgtcgcgaatgcggccgagaacgcggggaacgccatcgtcgatacggccgcctcggcatccgaagccgtcggaagcgccatgtgctcggctgcggaaggcgtgtcgagcgccggcgagcagatcgcgtcgtccgatgcgggcaaggcgatcgcaggggctgcgaacgcggtgggcggaatcgccgtcggcgccgcaatgggtttggcccagggagcgtcgtcccttgcgtccggcgctgcgtcgaccgtcgagggcggcatcaacgccatcaaggagaactcgttctccgcgcgactccgcaaggcacgcatcaaggggttccgtgacggcatcaagcagggggcctaccttgcgggcgagaagcggcacaacttcatctacgcctacgtggcgacgctctgcttcctgatgcgctgcgacggcgacttctcccaagaggagcgggagtggctcgaggacggcctcgactacctcaagctggacggcggcctcccggacgacgtgaaggcgagggtgcaggcgatcgcggacgacgaggacctgtccttcgaccgggtcaaggactgcctagacaacgtgagcatcgtgtcgctgggctccatcgccgagcagctgcaggtcgccgcggcctcggacggtcaggtgacggaggaagaggagcacgcctgcaggctcttcgccgactacatggcggcgagggctgcatgcgtggccgttgacgagggctgggccgagcaggcggtcgagaagtccgtccgcgagtacggcgagaatctcgagcgcattgaccgcgagttcaaggagcggacgaggctgcaggacgccgacgcggccttcgtcgtcgccgcgaccatgctccaggtcgcccgcgtgctcgtcatcaactccctgacggaggtcgagcgggcgggagcgggcaacgccaaggaggacgccctgcacagcttccaggaccgcgttttctccggcttcggcgatggggatccggcggaatcgggccgcctgttcgcctccaagagccacatcctctcctcgcgaggcgtgccgtacgacgcgacgcgctacgaggctgagaacttcaaggtgttcaagggggcgaaccaccggttcgcgaccctcggccacgacccggtgctcggcctcgtgttcgggacctcaaacatcatgaccaacagcatcacctgcgttaaggacgccaacgtcttcgggatcggcgcgcggatccccgcgacctactcggtctcctacgacgccttcgggaagaacccgctgatcggggcgcccgccgggaccgtggagatgctggtcgcggcgggaaggcgcgtcgtgagcgagccggatgccgccgcagcggccctggtcaagcagctgatccacatcggcacggacctctacacgccgtgcgggatacaggtcccgttcgccaacctcgttctcgacaaggcgcacaccgaggccctcaccaaatacgtcagcactggcgacgtattgaaagtcggcatgcaggcgggcatgacggtgctcatcaactggctgatagcggcgctccacggctgctcgctgatattcaaggacgacgggtcggactactgcaccgagatgtaccaggcgcgcaccaagaagatcatcctcatctccgacaccatcgcgacctcgagcagcgtcgtgcaggcatcgatcacgaagaaccccaagtgcctcgacctcggaggcgcggcggtgctcgtctaccgactgttctcggatgctcgtttcgtcgcgaggctcaaagaggagtacgtgcaatcggagctcgacaagatctacgatgaacgggccaagcggttgctttgaggtcttacaggaatgattcaaccactaaaaagaagcaggagaagagataatggccatatgcgactcgtgtaaaggcaacagcatcctcccagaacattacggggctttgaccctttgcaaaaagtgctccatgaagatactcgctccaacgtggaagaacaaaatatactcgacgaacgaagaggttcacgagcagcgagagaagacgcttgctcgagccgtttccgctggttttccttcagatgctattactaagctgggatcctactttgacggcttgataattcccggtctctttaagatctttgatggcggcaacgatcaagggctagtcgtcaaagacgagtcggtcattatcgtcactgaagatgatttcgatccaagcgacgcccgcaagcaattggggttgatagcgagcgggcgacgcggcctttcaatcgacgaagacgataacgtcgacgcttttgatgccgccaatcttgcaaaaatagctctgggagctttctcgagtggcggatcgttagggaaaatagccatgcgcgctggagcggaaatagccggcgaagtgatatcgaagtcgaatcggccaacaatagacgacctgcctgtgcttccgcaattcgacgtcccctttggcgagcaaacggttcgatacaaagacgttgacgattttgagttctacatcccagaaggagaggagaacctcggttttctccttttcacgacagcggtatccagaaagcagaaaaaaatagtcttctctttcgatccaggggagaacaggaagcaagccgccatagagatagctcgattcatcgaaagcaaactcgatgacaaggcggctgaagcggaagagcaagaggaatccatgcgcacggcgaacagcccctcgcgtcaggccgatgctttatctgcgccagatgagctactaaaatggaaacagcttctcgacgcaggcgccataacaaatgaggattacgccgcgaagaagaaacagcttctcggtttgtgagtcgttgccggcaattccgctacgcaagcgtgtttcacatcacccacttgaacacggcgcggaacagccagacgaaaaagcccagcgtgacctttagcgccgccatgaggaacctaccaagcctcttcatcgacgtcaccccaatcttcctttaccttgcgggcgccctcctcggcgccctcttccttctcttgcgcgagcagcctcgccagctcgtctggcacgcccgggacctccgccctccccagcgcgcgctgcaggtcccttatctgcgatttcagcggttttgagggagggcccacgtgctcgcggtagcaagcgcaaattgcagccgcgtcgcacaggtagccccgcacccgggcgaacgcctcgtcgccgtcgagcaggacgcggcgggcgcgcccaagctccgcctccgaggccagcatgaagcgccacccgcgggacctgcgcgcggccgggatgccgtccgcgggcgcgtcggcacgccagtcgtcgcgcacctggtgccagttcgccgtgagccagagccccttctcgggctcctcgcgcatctcgagctcgaactccgtgagcatgttcgcgccggagaacggcgacccctccgtgaacgagagcgtgtcgaacagcgtcgtcctgccgccctcatactctatcctcaccatcatctccggcccctctccctgcgctggtcctgctgagcccgctgccgctcggcggcgaggattcgctgttgctcgtcctcgcgacggccgtcgcgagagtttccttcggcagcgccgcgcccgcgatcgtccccgtagcgggtcttgagcggcatgagcccgttcatcgccatgtaatcgcgcgcagcctcgaggcggcggtacccctcgccgcccgcctggccgcggcgctccagcgtcgccatcctgagcccgaactcctcgatggactcgacgtcgaacttcgcacaggtctcgagcgccgaggagagcttgctcagctccgagaggtcgttgagctcgagggcgcgctcagcggcctcgcgaatgcgcgcggtgctcgcgtccgtgggacggtaggcgccctcgcgctcgaagcgccggcggagcatctccttgccgtagacgaacccaagacgctcgccgctaaccctcttggacggctcctcgacaaggctgaacacccagtcgtcccgccgcgccttggccgagttgtcggcgacgtgcacgcccagggcgtcgaggatgccgaggaactccgcctcgtcgcgcgccgtggtcttggcgagtgcgacgcgggcgcggatgtcgccgacccacgagtagccgcccgagcgcatgatctccttctcggcccttccaaggtagacgttcctgcggctcctgggcccgcccgcgccggcccgcccgcgtgccctcgagggcgatacgggcgacctgtcgttggagagcccggacagcccgcgcgctcgcgccatgtcctgcaggtctcggttgaggtcctccgggtgctgggtctgcatgcggtagccggtacggaggttcgcgttgttcacgacgatgtgcgcgtgcggtatgccgcgggcgttgtcgtcgtggtagacgatggcgatctcgtggtcgccgaagtgcttgagcgcccacgagcacgcgagctcccgcagagcggccaggtcgatgtcgtcaccggggtccggcgagagcacgaagtgcttgaacgtgcgcgcgggcttgcccctccatgaggcgtccgtgccgaacgcggcgcgcgtggcgtccatctcggcgtcccaggcgcaggcctccttggcggcttctcccagagcgccggcgtcgcgctcgtcgtagctcaggttgaacaggtctcgcgccagggcgcggcctcccttctcgaggtagcggcggatgccacccgtcgagccgtggccgcttatcggcttcaggatcggcatggcgagccctccacgagcgagtcggcgccgatgcgcccgagctcggccgccatctcgcgggccgcgccgttcacgtcggcgagctcgtgctcgatcgttgggatgctctccgcgacgaggtcccggtcgacgtgcccgtggcgggcgtggaagttgatgaggttcatcgcgtgcactgcctggttgtagtggtagccccacttcgtgagctcccgagacatcgaccaaagggccctgcggtccacgagtatgcggtgctcgtctcccgcgttggcatccgtcgacagcggtatgcgaacgaggtagcgcaggtactccgacttgctgaggccggcgcgctcgcaccgctcgcaaagcgcgtcgtagtcgcttccctccatgcggaacgtgactcgacgctccttgcctttggcggcgtcggcttcctctttcatggcggattcctttcctcgggcccgccgtgcggcgggcgcgtttctctaggggcgcgggggatcccccgcaggcggcggcccggctcgggcgccgcctctgggaccgggcctcgcgaaagcgggctcttaaacggcccgcggcatgacgggtccgaggccgcccggtccccaagtgctatggacgcccgaccgaagtgtcggacgccataggctacttgctggatttcgggcctgaggcccttctgcgacgctttcgggcatcggtgcccgcctccgcgtacggcgcggtcatgagcgccatttcacgcagcagcgagaggtcggccgcgctcgggctctcgggcgggctctcgaggaaatcggcgacgagcctcgctgccttggagatgcgcccgtcggggccggcctgcgttttgctctcgctcctcacgtagtcggagagctcccgcttggtgcgccgccagggctccattgcggcgtgcatctccgcctggcgctccttcggcatgcccgcgagcgagcgcaccgcctcggcgctgaggttgccgcgatcggcctcggcggcccactcgggcgagaggtcctcggcaatccggcgggccagcctctcctcacgcgcaatggtcttgccggagaccttgcggcccgtctgccgctcgatgatggcggccttcacgtcgtcgacgcgcatgccggagagcgaggggtcctcggagcgcaggcgcacggcgtcgcccctgagcgcctcggtcgcggcggcgcgctcggtcacggtgagcgcgcgggtgaagtagttcgctgcgtggagcagcgtcaccgcccgctcgtcgtcgatgccctctatcacgcggcagggcatcctctcgtaagcggggtcgtccttcgcgagcagcgcgtaggcggccttgcgccgatgcccggagaccatctgccacgagccgtcgccgacctttcgcacgagcggcaggtcggtgaggccgtcctcgcgtatggactcggcgagctcagctatcccagcagggtccatagagtacgcggcgttcgccgggtggtcggcgatgtcggccaccgcgatctcggacaccgggtagcgcccgcgggtgcgcgacgcgccgtcgagaagccccgtgatggtgaagcccgcggccacctgcctaggcgagttcacggcacacctcgtctgcgagcgccttgtagtcgcgcgcggggcggctccccggctcgaaggcggccaccggcttccactgccagctgccctcgcagaccttgctgctcgcgtggatgaccgtctcgaactgctcgtccgggaagaacccgtcgagcacggccgcgcccgtggcctcggcgttggtcatgcggccgggcacgcaggtgcgcagtatcttccagcggggcgtgggcatgcgcagagcgtcggcgatggagcgcgtcgcctcgacggtgagcgccgtgccgcgcatcacggtggagtcgagcttcacggggatgacgaccatgccgccctccgccgcggcgaggtaggcgttgaaggcgagcctgcgcatcacgggactgcagtcgatgaggcagacgtcgtaggagcccgaggcgtcgtcgagggcgaacttgagtcgctgctcgcgcaggagcatctcgttctggtcgacgaggtcgatggtcgaggccaccacgtcgaggttctccccggcagcgtaggcgacctcctccacgggcgcgccgccgtagagcagctcgaccgacgtgcgccgctcggagacggcccggtcgtagaggccgaagaagtctgtggcagacgcctgcgggtcgaggtcgacaagcagggtccgaaggccccgggcggcgaagatcgccgccaggttcacggcggtcgtcgtcttgccgacgccgcccttgtagttggaaatggctatcgtgcgcatgggtcgcgtcctctctagcgtggggcgcgcctcggcgcatccggtccggcgcgccccgagtctcggagcgtcgggacaaaaccgtacggatttgtccgacaagcggagtgtaccacgaaaacgtacggatatgtacgctttcgtggtacaaggggtggattcggggaaacccggccccgggagcccggggccgggcgcgccgcctaggagagcggctccatctcgccgaagcagttgatgtggtggcgcaggagcgctcggttttccttgacgaccatcatcgccacctcgtcgaagcggaccggcgtgtcggcgtagtcgtcgccgttgccggcgagccacgtcgccgccagcgcctcgcgcagcccgcgcgccctgtgggcctcggggaagccgtccgttccgatccggaccgtggcgtcgacgaagaccagggtcccgtcctcgtccaccgccacgaggtcgattccgccgatgccctcgggcccctgccaggcctcatcgacgatctcgtagcccttacgctcgaggaaggtcctgaccgcgcccatcgccttttccttcatgtcgttcatgtcttgctccttagactcggaggcccgcccctgtggcgtgccttgcgtcgcgtgagtcgcatgcggcgcgggcgtgccggcaagggaggaagcgaagtcgggcgtggaaatagaagtattccgacggcagtttttcgcgttgttcgcgcgcgcagcgcatggagcgaagaacccgaaaaagtgtcgcggcccttgcgggccgcctgccggcgtgcgaccctgcgcgtccaaggaacgccggggcgggtttcggatcggaagggcgcaggcgtgcggcatggaatcaggcatgggcgccgaggcttccaggcatgggatgcgatctgtcggcggttgctgggctcccgtgggattggagacgacgccgcggcgggaacgacggcgcgttcccgagtcgcggtgccgtggtccgcatcgggacggcattccccgcgccgcttgcggccaatatgcgcacgggatcgcggtggcgagatggttctccatgcggaacggctacggtgctgcgcaacacgtccgtcggaagaaggaggacagccaatgatggatatcaacgagaaggacgagcgtcgtgagctgcttgacgcggtggcggatgcaggaaggctggcgaggggcctggaccagctgctcgagtccctggcgcacgccgaccagctggacctgctcgacgtcgagggggtcctggccctgaggtcgataagcgagaggtgcgccgagcgcatcggcgacgccgcgcgaatcctggaggcgcaaaacgagatcctctatgtcgaggaacggaccgtttagcttcctttcgcggaagattaactatttgctttgcgggcaacaccctaaagaatcgcagttcctggtcggcgcttagatgagcgttagccgcgacccattccaaagatacttgcattgtcggcgttgtcgttagtttcgacctcagtcgccatcgccgggaacgattcttcctgagacgcgtcgtccactcgcgagtcaataggctcgccgagcgccaggaagaacctcatcacgtgctcgactctctgctgcagagactcgctcagctcgctgtaggaggccgccagccgtacttccttggccaactccgccatcgagtccttcagcgccttctgcacgctcacagagggtctcacctcgacctgggtatcggtgagcttggcgatgatgtagtcctgcctgttcatgccgctccaggcggccatctcgcatatgagcttatgctcctcgggcgtgcagcggaacgccatcgtcttactgcgcttgcgggcgctgttctcgcacggcatccttcttatcccctcgccccgtcaagggcggcggccatctcgtcctgcttcgtggggaacaggtgcgcgtatcggtaggtgatgtccaccgcctcgtggcccatgcgctcggcgatggccagcgcggagaagcccatctcgatcagcaggctcacgtggctgtggcgtatgtcgtgtatgcggatgcgtttcacgccagacgccttgcaccctcgttccatctcgtgggccaggaagtgcttggtaacggcgaacaggcgctcgtcgggggcgacgtcgtctcgtagctcgatgaagtccgccatctcgtcgcgcaggaaggcgggcatgacgatcgtgcgcaccgacttgggcgtcttgggatcggtcacggtgtctacgccgtggaggctttggtacgacttgttgatgcgcagacgcgaactctccagcatgaagtcggacggagtgagcgccagaagctcgccgcagcggatgcccgtccagtagagcagctcgaaggcgtggaacgagagcggcttgtccatgacggcctcgctgaacctcaggtactcgtccttggtccagaactgcatctcgccgcccttcttcgagcccatcttgtcgacccttcgcaccgggttgtcggtgagcccgtagtagcgctcggcgtggttgaagatggcgttgagttggttgttcaccgtgcgcaggtacgtcggcgcccagggcttaccgtcggcgtcccggtgttcagtaagctcgttctgccacctaataacgtcgatcggcctcacatcgcacatgcgcatatccccaaagaacggcacgagcttgtcgttgatgatgtactccttggtgatccacgtatgctcgcgtatgcgaggcttcacctcggaggcgtacacctcaacgaactcggaaaacgtcatgtccatggccccgccgttaaggctcttgaactggctttcccatacggccgcctccacctcggaggagaagccgcgctttgtcttgtggcgcttcgagccgcgggcgtcgcggtagtagcactgcacgaagaacgtgccgttgctgtcgtccttgtacaccggcatgtcagtccacctccgggaagtacagggcgtcgaagacgtcacttcgaacgcgtccgcggataaccacgcgcccgcgcgcctcctgctcggcgtttatcttcctgatcacctcgtaggcgctgcctttcttgatcctcagcagctccgcaacctcgtccgcatccagcatgtgcggtctcggcgtctttgccaccttctcgtccatggctcctcctgtcattagcgtacagatacgtacggtttacagattcagagtaaacgtacatatctgtactgtcaatagaattgcgtacatttgcgtacgctggtaagatgtgcgggtacgtaattccaggaggagggcgcatgtccgtaggcgagaacataaggcggtaccgcaagtcgcgcggcatgacgcaagcgcagcttgccgaggcggtcggcctgaccgagggggccgtgcgccactacgagagcggcatccgcgccgtgaagcccgagctgctcgaatccatcgccgcagcactaggcgtatccgtcaacgccctcaaggattacggcgtcgaaaccgcgggcgacctcatatcgctgctcgtgcggctcgaggactcattcggcatcgtgcccgcagccgacggcacggggctctctctgaaccccaaggcgcctcacgcgcccaaagcggcgatggcgatccagctgtgggccgagaagcgcgcacggctcgagaacggcgagatcgacgccgccgagtacgaggactggaaagcctcgctgtagcagctctccgcatttcgctaccactaaaaccgaatcagggcgccaggatagtcggtgagctccgctcgcacctgcgtatgctgagtttttactctccattgcatgccaaggcatttcaagcgtaaacggggagtaaatgacgcggtggcttacacggcagcacacagcagtacgccgcggcatttcccctggttactcccgttttcattgagatggcgagattctttactccccattaaccacctggggaaacgccgtgcagagaccgccgaaaagccgattgagttcgatttgagtttcaaaggacctaaaacggccccttttcgttatcggggacaaaaatcgcacgtctactcacttgggataaattcttactcccattcctccgaataccgccccatactttgccgtcttgaaatacggggagtaaatagcaaaatcgcaggtgaaagggagtaaaaaggcaaagaaaaagcctccgtcccagcacgggaacggaggctcaattttcgtatttactcaccgccgtcgctgacggctttgccatgactctcgtacgaaacgaaactcagcggcacagtacggcactcaaaagtgcaggtcagaaccctatcagcctactcccactcgcaaaatgaaacttaattctaaacgcttttgtttgggggatttgatatcatttgatttttcctgatacctattatccttatcctatgggcttgccgaacttttgctatcatttggctatcaaggaaatggctatcaacgataaaattagattggtttctctggtggtttacaactacattttaccacgaaagacagggaaatgcaataaccttcctcgctgtggtgtatcaagtgatcttactgaacatatggcgcaccttgtccaggcggctgtttggacggcggggctggatgaccggctcgccgacagcggcctgataccctttcagttccgtcaggcatacgctccgcccgttggtgtaaaaggccagatcagtacggtatgcctgtatacagcgggcgggaatctcgccagtaaagacaacttcatccttttttacctggaccgtttcgatggtggcacagtatttcggtgcatcatgataagccctggaaaggtattcccggggcgcatagagggtgaaggagagataaggttccagcagttgcgtccctgattccttcaatgcctgttccaatacaatcggggccaatgagcggaagtccgccggcgtgctgaccggactgtaataaagcccgtattcaaagcaaatcttacagtccgttacgttccagccgaacaagccctgctccagcccgtaacggataccatccctgacagcgttttgaaaactctggttcaagtatcccagcgaaacccggctctcgtattgtacaccggagccaagcgggagtggtgtaacagacagtccgatggatgcccaaaacgggttgggcggcacctcgatatggatggtgtggctggctgctttgagcggccgctccatataaatgacggtgggttcctttaccactgtttcaagcttgtatttttccgacagcaaagcggaaacaacctccaactgcacccggcccaaaaaagaaagaatgatctcatgggtgatggaatccacctcgcagcgcaaaagcgggtcagtatccgcaagttgcgtaagagcgtccagcagccgttctctttgcgctgccgttttcggcgcaatcgacgtccgcagcatggggagggggtcctcacgccaccttttacgagggagccgggttgggtcccctaatacatcgtttaacctcacgctgtcgctgggaaggataacaatttcacccggataagcggtgtctgtccgaacaatttcccctttggatggaatacgcatctctgtgattttcagcttttctctcccggccagagccaccgtatcccgcaggcgcagcgttccgctgtatagccgcaaatagatgagccgctggccacaatctgtatactccaccttgaaaacgctgccgcatagggcgtcgctcccctgttccccaatcggttggaacagccctgtcaccgcatccatcaacggttgaatgccaaggccctttttggcgctgccatgatagaccgggaacagggaggcgtcttgaacccgccgctgttcctcctgcgcaagttcttcccggctgattggttctcctgcgatatacttttccaataattcatcgttattttcgatgaccgcatcccatgcttctatgtcggtattttcctccaggactatttccggggacagcgacaccgtctgcttgatgataatatcggcggagagcttatcccgaacagactgatacacgccctgcaaatcaacgccagcctggtcgatcttattgataaagataacggtgggaatgtccattttccgcagggcatggaacagaatacgggtctgggcctgcacaccatctttagcggagatcaccaagatggccccatctaaaacagccaaagagcggtacacctccgccaaaaaatccatgtggccgggcgtatccacaatgttgactttacatctgtgccactggaaggaagtgactgccgcttgaatggtaatcccacgctgccgctccaaaagcatggtgtccgtcctcgttgtccctttttcgacgctccccggttctgaaatggctccgctggcatatagcaggctctccgtcaaggttgtctttccagcgtctacatgggcaagaatcccgatattgataatgttcatgtctatcctccatacaaggcccaaatgggcgcaaaaatccccagcggctaatacttttaccgctggggatcatgacttcggacaaacagaagtatgacggcttacatgagccgctgtccgtcacgatatttactaaaaaggcaaaagtattcttaaattgggtacaaaaactaagcccctgcaaggggcaatcatttttgcgcccattatcaaattttatttaagaataccttgccgcatatttggtagactcctcaaatcaagataatagcagtatatcatagtacactctaaaaaacaagaaattattttacccgattccccaaataaatcaggagggcattcactggaacaccctccgtttttggtgattatcgtgcgcctaatcttgctttttgccttgcgtcccgtttccgttccttttcagcctgttcctgctggtaagcggcctctaatattctgtccgcctgttccgggccaatggcccgcctgacccgctcatagtccctgacctttccctttagactgtccctctcggcgcagacctcgtaaatcctttctgataaggaactatttttgctgacctcccggccatagtccgcttgcagccgctcaaatttggatttgaggtcgcagtaggcccggtagacagaccgcagcaccttgacgatcttcgcccataagggcttggcctttttctcccggtaggccctggccgattccagcggtcccgcttctggcaagacctgttccgggtcgctggaaaattcctccgccagcttctccatgcctttcagcatgtgggccacatcgtttagtttggccttggcctgggccgcttccttttcggcagctgccgcctccctgttccttcggtcaacctcggcctgggccagcacagccgcctcctgaagctgtgcaagccgctcctgttcacacttcaccttgaactgcgtgaccgtcagatgttcctcggaactgccacgctctccacgctccaagtccgtgtagccagcggagcgcatctgctgaaagaaatcatcctgcaagacgctgtacgactttctcagcacaggcttgccctttgctgttcgtaatggctccccggtggcctcgtctactgcgggctgggatgcccactttttgctcatgctgacctgcataacggtttctttgaccttgcccaccagggatttgtccttgcaccgctttgtccatcgtatctccttctccaccaccgggatatagaccacatggaggtggtagtggtacacgtcctctcccagcgcctcggacatagcccggttgcgttcgtcggcgtgcatgaccgccgacaaaatatactgctctccacctacgattttgattgcggatttgtatgcgtcggtgtaaaattgttttgcgaagtcatagccgccgtgattgtagaagtaggcggagttcacatcaaagaccaactcaccgtatcgaaatgcgtccgccttaatgccacgggtggagatcacaccatcggcctccatttgggagaacatctcctgataccctgcggatgggaccttgaaatggacattgagcgacgtccgctctggtacaatgtcctggttgacataggaatccttctcgcgttcgttgtgctgctgggtgttgccgattttagcagcggtcagcctcatatttcttgcgttggtgcggtcaatgccgtcgcctctcgccataggcaaaaatcctcccatttcagatgtttggttgttgaaaatggacgggggttcggggaaggcacttcctgcgggaagtgtaataacccactatgacactttcgccccgttggtgcgaaagtgccgtgggctctccgagggggtgcgggggctttgcccccggcaactgcggttgcctcccccagcagggccgccctttgaaaagggcgccctgcaccccgcctaaacttttccactcgccgttgggcaggtggaaaggcacagcctttccaccacccggcaagtgtcctccgtgggccaaatatcaaggggttcgggttgtattgccttgcggcaatctccacccacaggtatgcccccttgacatttgaccccgctccccgtgacagccgtgacgaccgtgacgatgttttggacaccgcccccgctctcaaaaaagccgtcacagccgtcacggtcgtcacgcttggggaggatccagggtcaggctgatacttctcccggcgtgggtgcgggtgttctcatagcggatatgatagtccgttgccagtttcccggcccggacgttcagccgcatcgccagggcattgggcttcatatccacttgcagggctgccgccaactccgtggccgtaccgccccaggacggcctctccgccgtgataaaggcggctacggcctccagcaccgggtcggggggttctacccacaactccgtttccatccgctccagtgtccatgtcaggtgttccttgtccttaatgagatagagccgctggtcttgctggtcacgtcctaccacatccaaggtggcggtgccgtccgtccgcttctccttctgaagaagaaaggccccgtctgctgcccccgacaggccgttggtgccggagatcatatcaaacttgtcgtcggcctgctgcttccgagtgtgatgtaccagtaggaggcagacgccgcaagcgtcagcaaggcgtttcagctttcctaccacctcataatcgttggcgtagctgtacttatccccgccagcctcccgaatcttctgaagggtgtcaatgataatcagtttggtgtctgggtgttcctgcacgaatcgctttagctgttcctccagcccgttgccgacctgctttgcgcagatggaaaagaggaggtcgttggtgccgtccatgccgaacatccggtaaagccgctcctgcaagcgacggtgatcgtcctccagcgccagatagaggacagtccccttgtgaacgggatagtcccacagggggaggcccatgctgacgtggtaggcaagctgggccatcagaaacgacttgcctaccttgggcgctcccgcaaagaggtacgtccccggatagagcagaccgtcaatgacgggcggtctgctctgatagacgttctcgtacaactcgttcatggaaatcgtggggagatacgccgggtcgttcatgcgctgcattttccgcagcagttccgcataatttttttcagggggattgttttctgtcgtttcctctgttatacttgcggtaggtgtttgtgaaatgggctgttccccgtctgcgccaacagacggaaccgggacagtccttttcgtttctctggaatccatcaatctatcaatcctccttcatgccgcccatgatagcggcgatcatctgaatggtgtccagcagttcatcgtccacgccagccccgtcctcggcccgccgcagttcgtccagaacggcggcaagctggtcacgcagggctttgtagaccttgggattaccctgtaccactacgtcccggcacaggaggcgtcttgtgatgtagtcctgctttgtcaggccggagagccgcacagcggcctcgatctgttcatcttcctccggggacacccggaaggccacggtcttgttcctccagcgatttttgttgtctcggtttttcagtgacatggttacgttcccatcctttcaaagtccagtttgtccgccatctccgtctgccttgtaggaaacagatgggcgtagcggtaggtgatatcgatactctcatgccccacccggtcagcgattgccagggcggtgaagcccatatcaatcagcagggaaatgtgtgaatgtcggaggtcgtgaattctgatccgcttcactcccgccgctttcgcacctctgtccatttcatggtggagatagtgcttgctgacagggaaaatccgttcatttgccccggtgctgtaaaacatctttaagtagtcctccatctctccacagaggaatttgggcatcttaatgacacggttgctctttttcgtcttaggagtggtaatcacgtccttgcccttgagccgctgataggatttgctgatggacaagcccgagctgctcgagtccatcgccgcagcgctcggcgtgtccgtcaacgccctcaaggattacggcgtcgagaccgcaggcgacctcatgtcgctgctcgtgcggctcgaagactccttcggcatagttccctcagccgacggttcgggcctctccctgaaccccaaggcgccgcacgcgcccaaagccgcgatggcgatcgagttgtgggcagagaagcgcgcacggctcgagaacggcgagatcgacgccgacgagtacgaggactggaaagccttgctgtaacggctccccgcatttcgcaatcaacgcaaccgaatcaggacgccaggctaggcggtgagctccgctcgctcctgcgtaagctgagtttttactccccattgcatgcaaaggcatttcaagcgtaaatggggagtaaatgacgcggtggcttacatggcggcacacggcagtacactgcggcatttcccctgattactcccgttttcattgaggcggcgagattctttactccccattaaccacctggggaaacgccgtacggagaccgtaaaaacgcccgttgagttcgatttgagtttcacgggccccgaaacggcctcgtttcgttctcggggacaaaaatcgcgcgtctactcattcgggataaatctttactcccgttcctccgaataccgccccgtgccttgtcgtcttgaaatacggggagtaaatcgcgaaatcgcaggtgaaagggagtaaaacggcaaagaaaaagcctccgtcccaacgcgggaacggaggccagattaccgtatttactcaccgccgtcgctggcggctttgccatgactctcgtacgaaacgaaactcagcggcacagtgcggcactcaaaagtgcaggtcagaaccctatcagcctactcccactcaatcgtcgcggggggcttgctggtgatgtcgtacgctacccggttcacgcccgggacttcggctacgatgcggctcgacactcgggccagcacttcgtagggcagcttcgcccagtctgccgtcatcgcgtcgctcgactccacggctcgcaggatgatggggtaggcgtacgtccgctcgtcgcccatgacgccgacgctcttcacgtcgggcagcacggcgaagtactgccatacgctgcgttcgctgttgcgctcgccggtctcctcgtacacgcggacgttgtaggcgtccagctcctcgcgcacgatagcatcggcgtttttcaaaatctccagcttctcgcgcgtcaccgtgccgatgatgcggatggccaaacccggaccggggaacggctgacgatgcacgatgtggtcgggcagccccagcgccgtgcccagcgcacgcacctcgtccttgaagaagtggtcgagcggctcgatcaaatcgaaatgcacgccgtcggggaaggggatcaggttgtggtggctcttgatggtcgaggccttgccgccggtcttgcgcgcgccgctctcgatgatgtcggggtagatggtgccctgcgccaggtacttcaccggccggccgccctcggccagctcctccgcgacggcgaagaactccttccagaactgcgagccgatgatgcggcgcttctgctccggctccacgacgtcggccagcagcgcggcgtagcggtcctcggcgtgcacgtgcacgaagtccacgtcgaactgcttcgtgaacacgtcctcaacttcttcgggctcgttcttgcgcagcagcccgtggttgatgaacacgcaggtcagctgcttaccgatagcctttgcgcacagcgcggccaccacggaggagtccacgccgcccgaaaggcccaggatcacgcgatcgcttcccacctgctcgcggatggccgccacggcatcgtcgatgatggagtccatcgtccagctggcctcaaggccgcagatgccgaacaggaagttcctcagcagctggtcgccgtgcggcgtgtggcgcacctcgggatggaactgcgtcgcgtacagccggcgctccgcgcactccatcgaggccacggggcacacgtcggtcgaggccgtcaccgtgaagcccgcaggcgcctcggctacggcgtcgcggtggctcatccacaccgtctgcttgacgggcgtctcgccgtacagcagggacgtcccctcgtcgcgccgcgtcagaggcgcggctccgtactcgcccttctcggtgtggcccacggtgccgcccagcgtgacggccataatctgctggccgtagcagaagcccagcacgggaatgcccagctcgaagatgcccggatcgatggacggcgcgtcctcggcgtacacgctggccggcccgcccgacaggatgatggccgcgggcgcgagctcgctcacctcctcggcggtgatgtcgcacgggacgatttccgagtacacgtgcaaatcgcgcacgcggcgggcgattagctgcccgtactgggctccgaaatcgacgacgatgaccaactggctggacggggtggtggacacgggtggctccttcgcataaatggatcgctctcgtttttcgctagccatcttacacgaaaagacagcgattgccgggttgatgaggcgtgctgcacaggctttgcacgaaggagattgccagctaactctctaagatgcaattaagtaaaaaataatttaatctgataagtagcgtgttgggagaattcatttttttttgtttagggagccgcattatggtcgctggttttaagattaaggaaattgagctccgttcagaagaaggaactcggttcagcccaaaagcactaacaatcattgttgggccaaataatgctgggaaaagtaggtttctgaaagaagttcggtctgcccttttgggtagattgagcgacgaagacggcggcctaatcctgggtcggaaaataataagcactattgaattgctgcttcccgaatcgacggacgctctatttgagtggtttgatctggatcgaaaagtggttcgcgatgaaaatggaaactatggtgtaagagagtactgcaatactggaattaatattaatcaatatggtcaaatagttcgagaagagtgtgcgacaaaatatcagggacagtggaaggatgtaatcgaatctcattatgcctctcccaatgatgcgcgtgctttagatgcgcttctcaatttcatagggccactgcttgtcggctattctggcacagaagatagattgattctttccgctggagaaccgtactacggcgtggcagattcaaatacgaattttctttcacgagttcgatcccaagatcaaatccttgatgacttgtcggaaatttctaaaagattatttgggaaagatgtcgtactcgatgacgttacaaaaggtggaatgatccaattcaagactggttcggatttttcgagttacagaacaagtgctcgtggaacctcagatttcgaattcctgttagagcagggtgtttccttgaaagacgaaggagatgggtttcgaagcttcgtttctgtatatcttgctcttaggtcgggagacaaacctgtagttctaattgacgagccagagtcttttcttcatccgcctcaagcttacgaactggggaaggtgattggctcttcagctgaacaatgcagccaaatgatcatagcgacgcatagtacgcatcttcttaatggcatcatgtcaacatgcgactgggataactgcgacattttaagactacagcgcgacggagactctcttcgagcgaacttgcttgaccgcgagggcttggatagggtgaaaggggatcctctgctgagaagcacgcgtcttttggagggcgtttttacgcgtgtcgtagttgtagtggagtcggagtcggatgagcttgtgtatcgggaaatcctgaataaagtgggcgtagccgacgaggcgttctttgttaacgtgcacagcaaggacagaattgcattcgcggtggaattttataagaacgttggcgttccctgctgcgcagtgatggattttgatattttgaatgataagaataagttcaaaagagtcttgaagtgttttgaatgtgaccctagcggaaggctttcccagatagctcaagagacaagagacgctatagaatgcgatgcgggaaagcccgaagagacaaagctacggtacaaacgcgatcctttgatgtatctagataagattgagaatgaagttgaagagttgctagatcgatgcttggagtgcggttgtcttattgtgaggacgggcgaactcgaaaccgtttttggagaaaaggtagcctatcgatcttcgaaacgggcttggctctccgaagccctggattatctgaaccatttggagcctggcgaattaacttctcttgcgatcgtttccgatctcataaagatgttgcaggttgcgaaatagggctgataggcagttgtattgtcgaatccgatcttcttcgcttgcgatgtgccccctgtggtttctcgacgctccacgctcatcctcgtgtacaatttccggcatggagaacgcgcgaaacgacatagaggcgcttgacgacttggagctggacgcgcccgcgtccgttcctgccgcgtcagacgacgtcgccgcgcctgcgcgcccggcgaaacgtcctcgtcgcgaggctcccaccgacgaggagcgccgtcagatgcacgcctcgttcaacgaccgcatctcctacctttgcaagatggcggcgctcgtagtggcgctcgtctcccttgccaccatcgcgctgggccaagagcttccccaattcgttctcatgggactgtgcctgtcggtggcgcttttggccatcgccatgctgcaagaccatcatcagcgcaaacgataaccgcatcgacccaaccaaggatacgcacgcatgatcatcgaagcattgaaggccttcctcatcggcatcgtggagggcatcaccgaatggctgcccatctcctcgaccggccatatgatcctcgtggacgagttcgtgaagctgcaggtgtccgacgagtttttggccctgttcctcgtggtcatccagctgggcgccatcatggccgtgctcatcctgtacttccacaagctgaacccgttctcgccgaagaaggacgccgtcgagaagaagagcacgtggcgtctgtggggcatggtggccatcggctgcatcccggctgccgtcatcggcctcttgttcgacgatctggtgaacgagtacttctacaacaaggtgaccgtggcggccatgctcatcctgtacggcgtggtgttcatcgtgctcgagcgccgcaatcgccgtcgactgcgcgaggccgaagccgccctcgaggcgccgcgcggccgccatgcgcgcgtgtcgtacggcgatgtgtccgacgaggccgaggcatcgctgttcaagatcaccgacgtggacgagatcgactggaaaaccgcgctcaagatcggctgcttccaggtattggccatcatccccggcaccagccgctccggtgccaccatcatcggcggcatgctggccggctgttcgcgcaccgcggcggccgagttcacgttcttcctggccattcccatcatgttcggctggggtctggtgaagtgcatcaagttcgtggcggccggcatcgccatgacctccaccgagatcctcgtgctggcggtgggaatcatcacggcgttcgccatgtcggtggtggccatcaagttcctcatgggctatatcaagaagaacgacttcaccgcgttcggctggtaccgcatcgtcgtaggcgtgctggtgctgggctacttcgtcttcgaaagcatgggcatgctgccgtaaaggtcgtgcatacagatatcgcacggttcgcggcgcgccttcgggcgcgccgctttgcgttatcgctgcgccccgctacgccatgaacagcacggcgagcagcgggatggtgaaaacggcgcccagcgtggttacgaacgtgccctgcgccatagtcttgctgtcgccgccgtactggtagcacagcatggtgccgttcgtggccaccggcatggccgacagcagcacgatcacgcccagcagcacggggtcgctcacgaggaaatgcagcggcagccatacgagcgctggcgcgaccaacaggcgcacgagcgcggccgccatgaggcgcggcccgcccaccagctggcgcgccggcacgttggccagcgacgagccgatgatgagcatagccgccggggtggtgagcgagcccagggtgtccagcgcctcgccgagcaccggcacgccgtggatgccggcgaacgccagcgcgattgacgcgacgctggccacgatgcacggcgagaggaacgacttcgggctcatcttgatcttcacgccgtatttgttgtccgtggcgagcatccacacgcccagcgtgaagacgagcgcattgaacgcgagattgaacaccgtcgtgtagatgagcgcctccgcgccgaaaacagccgccgtcacggggaagccgatgaagcccgtgttgccgaacaccatcatgaaccggaagacgcctttgcgtccgtcgggcacgcgcagcgcggccgtgatggagaatccgattgcgacgagcaccacgtagctggcgcacgaaacgcccgcggtccagaggatcttcgtcgccgagggcagcgtttcggcggtcagcacggaggccagtataagcgccggcaacgccgtattcaggatgagcttcgagaacttcttgtcgaagtcctcgtccatgaggttcagccgcttggcggcgtaacctgtcgcgcccacggcgaacaggacgaccatctgcacgaatatgtcggcgaattgcgagatcaacgaggcttccctctcaataggttcggattcggcgcagcagcgaggcgcgcgtttccagtgtacaccgtcaacgggagccggggcgccgagcggcttgcagcttcgcccttccatcggttttcggcatgcgccgaccgcgatatcccatgaacttcctcgctaattcggccggcatggcaatcgggcgcgccgcttttgctatcatgtcagcacacgtgtcgcccgagaacatcgccgctttcgcgcgaggcagcgggtcgaaccgcacgttaaagcatgagagtcatgagaggaaaagccgatgtctgagagagacagctccctggcggagatccaagaacatcgtgccaagatcgacgagatcgacaagcagatcgtcgcgctgctcaacaagcgcgccggccactcgctggtcatccgcggtttgaagcccggagcccacctgggcctgtacgacgccaagcgcgaagaggagatattcgcgaaggtgagcagctacaacgagggtcctttgtacaacgagaacctgtgcgagatctacgccaccattctcaagatcatgaaggagaccccgtccgtatgagcgaagcgaagatagcccccatccccgacttgggcacccgcaccgacgagatcaccatcttcgccggcccgtgctccgtcgagtcggccgagcagttcgaagaagtggccgaatgcgtcgcgggcctcggtctcacctggattcgcggcggcgcgttcaagccccgcacgaacccgcactcgttccagggcctgggcgaggaggccctcaagatcatgcgcgattccggcgagaagcacggcctgaaaacgctcaccgaggtcatggactcggcgcactgcgagctggtccactcctacgtggacggcctgcaggtaggcgcgcgcaacttccagaacttcagcctgttgaagaaaatcggccaggtcaccgccgagtcgcacaagatggtgctgtacaagcgcggtttcgcgggcaccatcgccgaatggctggccgccaccgactacctcacggcggaaggcaacgacaacgtggtgctgtgcgagcgcggcatccgcacgttcgagacggccacgcgcttcacgctggacatcgccgccatcccggtgatccacaagcagtcgctgtgcccggtgtgcatcgacgtgtcgcaccctgccggccagcgcgacctggtgccgtcgctcgcctttgccgccgtggcggccggcgccgactccctcatgatcgaggtgcatcccaacccgcccgcggccctgtccgacggcccgcagcagctgacgccggcccagttcaaggtgctcgtggcgaagctgcgcgagatcgccgccgtcttcggcaagaagatcgtgtaaggaatcgggcgcgtccgacggctcggaaaccgtcggacgcgccccgtttgtaaaaactttacccgaactttaccttcccttgaccggggccttaccgtctgcccggtatcctttcgactcgcgtgcatgagcgcttgcaaccgacgatgcgaaggggagtcccgcgtgaacgctccgatggaaaccgtgttcggcctgctcggcggactggccgtgttcctgttcggcatgaacatgatgtccgagagcctgcagaaggccgccggcgccaagatgaagtcgatcctgtccatgctcacctcgaacccggtgctgggcgtgctggcgggcgcggtggccaccgccgtgctgcaaagctccagcgccaccacggtcatggccatcggcttcgtcagcgcgcgcctcatgacgctgcgccaggccatcgccgtcatattcggcgccaacatcggcaccaccatgaccgcgcagctcatggcgttcaagctcagcgactacatctggctcatcgtgttcgtcggcttcatcgtgtggttcgcggcgaaggacgagcgcgtcaagaacatcggccagaccgtgttcgcgttcggcctgctgttcgtgggcatcgacaccatgggcgcggtcatgaagccgctcgcgcaaagcgaggtgttcctggcgatgatcgaccaggtgaaggatatccccgcgctcggcgttgcggcgggcaccgtgatgacgctggtcgtgcaaagctccagcgccaccatcgcggtgctgcagagcttcgcctcgcagcccggccccgacggcgtgaccagcgtgctgggcctccagggatccatccccatcctgctcggcgacaacatcggcaccaccatcacggcgctcctggcctgtatcgggcagtctcgcgacgcgaagcgcaccgccgtggcgcatagcgtgttcaacgtcacgggcgcgttcgtgttcatctggttcgtgccgcttatcgcgcagttcgtgcagcttctcacgcccggccccgagctggacgtcatcgcgcgccagatcgcgaacgcgcacaccacgttcaacatcgtctgcacgcttctatggctgccgttcatcggggctatggtgaagatcgtgacgtttctcgtgccgggcaaggccggcgaggcggcgccgggcgcgctcgtcgtccttgacgacaagatcctcggtcagccggtgttcgccatcaggatgttcggcgaggagctgcagaagtactgcgacaaggtgcgcgccatgctggctgcgctgcccgaggccatcgcgaaccgggacgccgccgcgctcaaggcgctccaagccgattgcgcgcaggtggaagccgcggaaagcgagcttgcgaattacgcggtggagctgctgagcgccggcgcgacgtccgagcggcaggctgcggagatatccgacctcatgttcatcgtggacgcggcgggccgcatcggctcgcgctgcggcgaagcggccgcgctgtacggcgagcgcctctcgtcgaagaagcccttctcggacgaggcgcgcgaggagctggccgaaagcgccgcgatggtggcggacatgtacgacgcggtgctgcggttcctgagcgacggaggcaccgcctccgagcaggtgctcgacgagcgtcgccgccagatcgtcaagcggcagagccgggcgcgcaaggcccacttccgccgcgtgggcagccggcagtgcgcgcctgagaacaaggcggtgtacaaccagctgctgctgtgcctggagcgcgcgggcaacgagtgctcgaacctcgtggagcacggcgccgagctgtccatgtggggcgacgcgctgggcgccgaccgtcccggttcgcatgacgggggagcgccgccggtcgcgaagcgttccgaagcgcctgtcgacgagctggcggaggcgcttgcgtagcggcccctgcgcttgcgcagattgcgcgcgtttgccagttgccggaggggaaaagcggtagaatacgaaagctatgtttcacctccatccgtcaggagactgctcatatgtcaatcgatatcgacagcttgaacgggccgcagcgcgaggcggtcgtcaccgtcgacgggccgctgctcgtgctcgccggcgccggctcgggcaagacgcgcgtgctcacgtaccgtatcgcgaacctcatcgagaaccacgacgtggctccgtgggagatcctcgccatcacgttcacgaacaaggcggccgccgagatgcgcgagcgcctgaacggcctggtgggccctcgctgccgcggcatgtgggtgtcgacgttccacagcatgtgcgtgcgcatgctgcgctccgacgccgagaagctgggattcacgcgcaacttcaccatctacgacaccgacgaccagaagcgcctgtacaaggagatcatggccgagctggacatcgacccaaagcgcttccctgtgaacgccctcatgaaccgcatctccacggcgaagaacgagctcgtcgtgccgagcgccttcgagaaggaagcgggcgacccggtggggaaggtggcttcgcgcgtgtactcccgcttgcaggagcgcctcaaagccgcgaacgccttcgacttcgacgaccttctgctatacgcctacctgctgctgaagaaccacgaagacgtgcggtcggcctaccagcagcgcttccgctacatcatggtggacgagtaccaggacacgaaccacgcccagtactccatcacggggcttttggccgaggggcacaagaacatcatggtggtgggcgacgatgaccagtccatctactcgtggcgcggcgccgacctgcgcaacatccttgagttcgagcaggactacccgacggcgcacaccgtgaagctcgagcagaactaccgcagcgtgggcaacgttctggcggctgcgaacgccgtcatcgcgaacaaccagcaccgcaaggcgaagaagctgttcaccagcgccgaggacggcgacaagatccaggtgtacatggccgccgacgagcgcgacgaaggccgctggatcgccggcgagatcgagaagcagcgcgcggcggggctgtcgtacaatcaggtggccgtgttctaccgcacgaacgcgcagagccgcatgctggaagacatgctgctgcgcgctggcgtgccgtaccgcatcgtcggcggcacgcgcttcttcgaccgcgccgagatccgcgacgtcatggcctacctcacgctcgtcgtgaacccggccgacgacatcgccgcgaagcgcgtcatcaacgtgccgaggcgcggcatcggcaagaccaccatcgagcgcatcgagcagttcgcccgcgagatgggcatgacgttcatggagggcgccgagctggccatcgtcgatccggagctgcgcgcgtcggcgcgccaggccatcggggagttcgtgggcctcgtcaacgaggcgcgcacctacggcggcgatttgcgcaaggtcatcgagacgatcatcgacaagagcggcctcatcggcgcgctgcaggccgagaacaccgacgaggcgcgcggccgcatcgagaacatccaggagttcctcggcgtcgtcgacgagttcaccgaaacccacgaggacgaggacgcgctgtacgaggcgcccacggccgagccggccgacgcccccgcgctcgcccccgtcccctcgtccgccgacgccctcgcgggttcgttctacgccttcgcgggcgcgaacgagcttgcggctccggccgaggaaagccccgtgcgcgtcctgcgcggcgactcgctggccgatttcatcgagtgggtgcgcctgcgcaccgacctcgacacggtggccgaggacggccacgccgtcaccatgatgaccgtgcactcgtcgaaaggcctcgagttcgactgcgtgttcgtggccggcatggaggagacgctgttcccccacatgaacagcgtgggcgatgcggccggcatcgaggaggagcgcaggctggcgtacgtggccatcacgcgcgcccgcaagaagctgttcctcacctgcgcctacgcgcgccagatcttcggccagacatcgtcgaaccccatctcgcgcttcatccaggagatcccctccgagctgcgccagaccacgggcctcggctcggcgggcttcagcggcacgggctgggagaagcgcggcagccgcaagggcatcgccggcagcggcaccgaggcgggcggcggccgcgtgttcggccgctccagcgcgtcgggttcgtccggccgcagcgacgagcgcgccgcgcgcgtgggcggttcctacgtgcgcccgggcgccgagaagaaggccgccgcgaagatgacgttctccacgggcgacaccgtggaccacaagacgttcggccgcggcaaggtgacgaaggtggacggcgacacgctgttcgtgaagttctccaaaaccggtcaaacgaagaagcttctcaaagattacgcgcccatcgtcaagatcggctagcgcgaggcccgcatcggaaacggtgcggcctcgtcgtttttaggcgtttcggcttcttctttcgcccaggctcttgcaacgcggtgcgctataccgcatgatagacgcgtcgatgacgtgcggtcgccaccgatctgcaaccccgcgctcttcgtccggctggcgagagaaagaggttcactatgaagatcgttaccgactcttccgttatgttctcggtggaggagggcgcgcggcgcggcatggccgtgcttccgctcgtcgtgaccatcgacggccaaagctggctcgaatacgaggacgtgtcggccgaggagttcttggcgaaggtacgcgcgggcgcgctgccgcagagcgcatcgcctcctccggcgctcaccctgaaggcttacgacaccgacgaagaggtgattcacctcgccatggccgacgggctgtcgggcgcctacgaggtggcgtgcggcctcgtcaagcaggcgcgccgtcccgatcgcgtgcatgtggtgaacacgcgcacgctgtgcgtgccccatcgggtgttggcctgcacggcggtgcggctggccgaacagggggcggacgcaagggccgtcctcgagacgctgcatgcccagatcgctaccgctcactcctacctcattcccgaagatttcgactacctgcgccgcggcgggcgcctcacgccgctcgcggcgacgttcgctcatctcgtgaaggcgtttcccgtcatgaagcagaccgacgacggtacgcgcctcgagaagatgaaggtggcgcgctcgttcgcgaaagccgttaacgccatcgccgacgacctggaggctcggggcgtgggcgatggcttcttcctgggcgtgagccatgcagacaaccgcgtgcaggccgacgaggcgtccggtatgctgtccgagcgctttccgggatgccgccacggcgtcttcgacctgggccccgcgttcatcacgcagggcggccccggctgccttgccatacaagctgtcgacctgggagcttatcccgatctcgatttggattaaccgaggggcccgggatgcgggcccctcggtgcagatgcccgttccggttgttcgcccgccgagtctcggccggcgcgctagttgcaccccgggcagtaggcgcaggccgtcggcgcggcggctatgcccccgagagcgctttcgcgcagttcgaacggcaaggttcgacccacttttcgcatagcctccaccgtctggtcgaagtcgaccaggttgccgatgcctgcgagtgcgatctgcgcgctgaccagcgcgacggcggcgccggcagcgttgcgcttctggcaaggttcctcgacaagacccgcgatggggtcgcatacgaggcccatcatgttggtcagcgcgttgctggccgcgtcgaggcattgggcgggcgcgccgcccatgagctcaaccgacgccgccgcggccatcgcggcggccgagccgatctcggcctggcagccgccttccgcgcccgataccgtggcgttgcgcgtgatgaggtacccgatggcggcggccgccgccaggccgcgcgcaagatcgccatccgacagcccgcgcgtgcgctgcagcgccagcagcacgccgggcagcacgccagacgatccagccgtgggcgcggccacgatgcgacccatcgacgcgttcgtctccagcaccgccatcgcgtaggcgatggcgcacgacagctggtcgtcgcacagctcgccgtcgcgctcgcgcagatcggccagcttgcgcgcttcgccgcctatgaggccgcccatggaaggcagcgcttcgtcgatggggcgctgcgcggcgcatttcatcacgtccagcgtctcgtgcaaatacgcgagggagcggtcggcgtaccccaagctctcggccagcgccgcctcgcgggcgagaaacgcctccgatagcgtcgtgccgtgcttttcgcaccatgccagaagcgcggctccggtgccgaagtccgcctcggcgaaccgctgcagcgcctcctccgcgtcgggcgcgtcaacggacccgcagccggggcgcgcgtcgccgggaatgacgcgcacgtccaggatggcggggtggtcctcgatggcggccttcgcggcgccgtccacctcttggtcggtttccagcacggtgtaggcgatgtcgcctttgcgctcgcggtacatgcgcgtggtggcgatgttcacgccttcgtcgctgatgctctgcgcgatgtgcgccagcacgccggtctcgtcgcgctggcgcacgacgatgctcgtgctctcgccggtgatgcgcacgtcgatgtcgtcgatcttgcggatgacggccgctccgcctccgatgctctcgccgcgcacgctcatcgcgttgcccgcggcgtccacgatgtgcatgtcgatggtgttgggatggtcgtattccgcgtcgggaagcgtgacgaacgagaacgcgagtcccgcatcccccgcaagctgaaacgagtcgcggatgcgcaggtcgtcggcggccagccccagcatgcccgccacgagggccttgtcggttccgtgcccggtcagcgtgtgcgcgaacgaccccagcagcctgaactccaccgtcttcggctcggccaggcacagccgtcgagccatgtaggcgatacgcagcgcgcccgccgtgtgcgagctcgaaggacccaccatgatggggccgatgacgtcggagaggccgagagttttcatagatgctcctcgattgacgggtagggaagggggcgggcgcggggatggtgcgcgcctatggtatcacggactgtcgcagccgtctcgtgcgctctttctggctctttcgtgacgtttgcgctcgaaaaggctgatcggccgccgttcgcttcgctggtgccgctatactgtggctctcggcgccgcgcggctcggtatgcggcggcgaacaccctcatgacaagctaagcgagcgggatgcggcgtgcgtgcggcatccccgggtaaggagtacagcaatgtcggcaccgatcatcgtcgtgggccacaagaacccggacaacgattccatctcctcggcagtgggctacgcctacctgaagaacgagctggcgcgccgtgcggccggcgagggggagccgttccagacgtacgttcccgcccgcttggggccgttgcctccggagagcgcctgggttctggaagagagcggtatccccgcgcccgagatcgtgggtcacgtgcatgcgcgcgtcggagacgtgatgacgccgagccctatatccatcagccataacgccacgctgctcgaagcgggtcgcctgctgcgccagtacaacgtgcgcgcgctcgtggtgacgaacgacgacggcacctaccgtggactcatcaccacgcgcatgatcgccgagcgctacatcgccgccaccgacgccctcgaggacggaggggcgaacgagatggcggtcgccggcgacctcatcgcctcgctcggtcagaaggtggacgagatcaccgagaccgatgtgctcatcctcgacaaggagggcctgctcaaggaggctatcgaagacctcatggccagcgcgttgcgcgaggccgtcgtgctgaacgacgacggcctcgccatcggcatcgtcacgcgctcggacgtggccgtgcgcccgaagcgcaaggtggtgctcgtggaccacaacgagacgcgccaggccgccaacggcatcgaggaggccgaggtcgtcgagatcgtcgaccatcatcgcatcgccgacgtgatgactgccaaccccatccagttcctcaaccttcccgtgggctccacggcgaccatcgtcacgatggagttccgccgccacaacgtggagatgcctccggccatcgcgcgcgtgctgctgtcggccgtgatgacagacaccgtcatcctcaagtcgcccaccgccacgccgaccgatcacgagcaggtagcctacctcgccggcatcgcgggcgtcgatcccaccgaattcggccttgccgtgttcaagtgccgcggcggcgaggacgacatgcccgtcgacaagctcgtcggcgccgacgccaaggagttccagatcggcgacgccaccgttctcatcgcgcagcacgagacggtggatcttcccgccgtcatgaaacgcgaagaggagatccgcgagcatatgcgccgtctgcgcgacgaccacggctacgagttcgtgctgctgctggtcaccgatatcgtggccgagggcagccagttcatgtgcgagggcaaccgccgcatcgtcaaccgcgtgttcggcatccattgcacgggcgaaggcggcacctggatgcccggcatcctcagcaggaagaagcaggtggcggcgaagatcctaggagcataggggcgagggttcgcgccagcgttcttcgaaaaacgagacgaggaagccgtggaacgccgcggcttctttgctaagggggccgcttgtcggggcgatctcgatggtgcgggcgaacggcgcgtcggctatgctcgccaggcgcgcgctgctgtcgtcgaggcctccccagctgcgttcgggccaaaagcccacgcccagccccaagccgatcatgttcttcaccacggcggggctgtcgctttcgaacgccacgcgcggcacgaacccggcatgcgcgcacgcttcgtcgcataccgcgcgaaacgtgcggcttccggcgaggcagatgaacggctcgtcggcgaggtcggacagcggcaggggttcctgcgaggcgcgctcggcgggcacggcgatgccgatgcgttcgaagaaacggcgagcgcgggggtccgcgctctctgcgcgcacggtgcggacccgcaggtcccaacgtcgggaggaggcttcctgcgtcaccacgaaacgtgcgtcgggatgcgccaagcggtaggccgcgatggcgtccaccgccagccccgaggccgattcgatggcaagatggacggcggcccgctgttgcccggctaccacggcaagctcctcgggcagctcgtcgagggccgccagcagcggcgcgacgcgcttctgaagcgcgtcgccgcacgcggtcagccgcacgttgcgtcccacgcgttcgaacagggtcacgcccagctcgcgttcgagcctgcggatcgactgggtgagggcgggttgggccacgttgagcttcttcgcgctgttcgtcacatgctgggtgcgcgccacttcgtcgaagtacctgagctgctgcagttccatcgggagccttccgatcgttatccgctcatcctataacatctatcatatcattggagatgaaatttatattggacaacgctggggcgagcgcgtagggtggtgcctgttgcaggaaagcgaggccgacgatcgcagaacgatccggcgcggtaaggagatggtgggctcgtgtcagagctcttggaagcggccatgctcgtgtgcttcggcttgtcgtggccgctcaacgcgtacaagaatttcaaagcggcaacggcggctggctccagctggcagtttatcgccctgatcacgacaggttacatggccggcatcgccgcgaagttcgcatccggttcggtgaactgggttttggcggtgtacttgatcaacctcgcctgcatcggcgtcaactggatcgtgtactttcgcaaccgccgcctcgacgcgcagcgcgagatcgcgtacgaggcggctgaagcgtaggcgcgcgatgcccggacggcgtgcgtcgggtgcgggctacagcagcacgctcgacagcgcgcgtttgggcacgtagtgcacgcccgcctcgtcgcgccaatactcggtggcgccgcctgccggaaggtcgacgatgcgcacgtcttcgacgggtttgcctaacgccaacacgaggtcgggctggaagcggtccgcgtcgacgcccagcgcttcggccatgctcctctttttgaacgacgcgatgatgcagcccccgaacccggcttcgacggcctgcagcatgatggtttgcgcggctattccctcgtcccacgcggtgaaggtgtcggccaatgtgcgatcgttgtcgcggcataccacgacgtaggcgctcgggcgttcgcccggcacgggtcccggccagtcgggcagggccttcgcccatgcgcagcacgagaacacgcgctcgcaggcgcgctcgtcgctgacgatggcgtagcgcagcggctgcgcgttgccgctcgaagcgaccagtcgcgcggcgtccacccaggcggtgagcagcttgcggtcgatgcggtcgctttcatcgaatcgtcgatagcttcgacaggctttgatgatgtcctgcactcggaacctccctcgatttcgcggtacggagcgcgcggccccgttgcccgggttctcgcgcgcacggtgctgttgctgattataatggctttcggtaaccgaacccatcgtcgttgccgagcgttcaagcttggcggctgaaggagagaaagaaggaacgtccatgcaagagagccgtctgctcgatctgttctgcgagctcgtccgcatcgagagcccgtcgtttcacgaggccccgatggcggcccgatgcgccgacgagctgcgcgggctcgggttcgaggtgagcttcgacgattccgccgaacgtgtcggctcggataccggcaacctcgtcgctcgtcttccgggaacgcggacggggcacgtggtgttctcggcgcatatggacaccgtgcagccgtgcgcgggcatcgagcccgtcgtcgtggacggggtcgtgcgctcggcgggcgacaccatcctgtcggccgacgacaaggccggcgtggccgccatcttcgagggcgtgcgctcggccgtcgagtccggctcgcctcgacccgacgtcaccgtgctgctcaccacctgcgaggagcagcatctgctgggttcgagcgcgctggccgacggcctgctgcccgcgggcgcgccttgctacgtgttggacgccgacggcgctccgggcaccatcatcacgggcgccccgtgccattggtcgctcaacgcgacgttctcgggacgcgccgcgcatgcgggcgtgtgccccgaagagggcgtgtcggccatcgccatggccgccgcggccgtctcgtccatgccgctcggccggctcgacgaggccaccacggcgaacgtcgggttcatcgagggcggcggcgcgacgaacgtcgtgccggacacgtgcgcgctggcgggggagtgccgctcgctgtacgccgagcgcgccgaggctcagaaagcggccatgaccgaggcgctggaggccgccgccgcgcgcttcggaggcgcggtgagcatcgagtggacgaagagctacgacgccgtgctgttcgacgaggaggacgaactcgtgcaggccatcgtccgcgcctcccgagcggccggcctcgagccgcggttccatcgctccggcggcggctccgatgccaacgtgctcgccgcccgcggggtgcgtcccgtcacgttgggcgtgggcatggccgccttccattccgtcgacgagcacatcgccgtggacgacctggagggcgctgcccgcctcgtggaggctctcatcgccgaaggcgcgcagtaggccgcgcgcgacgggcgcgtctcatgcgggcttccgaaggcgatgccgcgtaagccgagcgccgccgcaagatgaaggcggccgaagagggttcgcgcatctgggagcgctttttcgccgatcgacgccggtcgcgcggcgacgcggttcggatcgtgcaggaagccgccgcgctcgatgcggcgctgtactgcacggccctgtgctcgccgccgcccagcgcatccaggccgactacctggtcacctccgacaaacggcttgcccggagcgcaccggtggcgtgcctggacgttccggacatgctcgcgctgctccaagccgcgaaagtcgacggggatggcggcgatacgctgccgacgggttcgaagtatttttgagaaacggtggacttttcgccacggattcgtcaccagtgtgggtttcacctgcgataacggttgtcaagaggtatagatactcccggatgcgtggcgtttgacaaccctgaggggcgatggtagagttcaccttcgcgtctccgaggaggcgagcgttttcgtgtgcgcatcagctgaacgcacttggaaacggtgttcaagcgagcgtctatagagtatgtagacgtctcggacaagcaagaggtaaaaggagagaagctttgcctaccatcaaccagctggtccgcaagggccgcaagaaggcagtcgacaagagcaagacgcctgccctgaagggcaacccgcagaagcgcggcgtgtgcacccgcgtgttcacgaccacgccgaagaagccgaactcggctctgcgcaaggtttgccgcgtgcgcctcgtcaacggcatggaagtgaccgcctacatcccgggcgtcggccataacctccaggagcactccatggtgctgctgcgcggcggccgcgtgaaggacctccccggtgtgcgctacaaggtcatccgcgccgcgctcgactgcgccgccgtggacaaccgcaagcaggctcgcagccgctacggtgccaagcgcccgaagtaacacccgctaagacgcgcgggccgcagcaaccgaccgagcccaaagggggcaggcgggcggcctaatgaacggagagaaagccgttccgaagcgcgcaggacctagaaggagaacacatgccgcgtcgtgcagcagcagtccgccgcgaagtacagccggacgcccagtacaacaaccgtctcgtcacgcagctgatcaacaagatcctgcttgacggcaagaaggccaccgccgagaacatcgtctacggtgcgttcgccatcgtcgaggagaagaccggcggcgatccgctggccgtcttcaagaaggcaatggacaacgtccgccccacgctcgaagtcaagccgaagcgtgtcggcggcgccacctaccaggtgccgatggaggtcaactcccgtcgtgctaccacgctcgccattcgctggatcgtcgacttctcgcgcaagcgcaaggagcacacgatgaaggagcgcctcgccgccgagatcatggatgccgccgagaacaccggcgcgtcagtgaagaagcgtgaagacctgtacaagatggccgagtcgaaccgtgcgttctcgcactaccgcttctaagggaggattcgactcatggcgaaaatcgaactgaaggatacgcgcaacatcggcatcatggcccacatcgacgcgggcaagacgacgaccaccgagcgcatcctctactacacgggcaagacccacaagatcggcgaggtgcacgacggcgccgcgacgatggactggatggtgcaggagcaggaacgcggcgtgaccatcaccgccgctgccaccacgtgcttctggaagtaccccggcggagctgacaacggcaaagagtaccgtttccagattatcgacactcccggccacgtggacttcacggccgaggtcgagcgttcgcttcgcgtgctcgacggcgctgtcgcggtgttcgacgccgtcgccggcgtgcagccgcagtccgagacggtgtggcgccaggcaagccgctacggcgtgccccgcatcgcctacatcaacaagtacgaccgcgtgggcgccgacttcttccatgcgatcgagaccatgaaggatcgcctgggcgcgccggctgtcgccgcgcagatgcccatgggcgccgaggacaacttctggggcgtcatcgacctggtcaccatgaccgcgtgggacttcaaggccgacgacaagggcatgacctaccccgaggccatggacgccatcccggccgagttcgccgaagaggccgagctgcgccaccaggagctggtggaagccgccgccgactgcgacgacgctctcatggagaaggtcctcatggaggaagaggtgacggttgacgagctgaaggccgccatccgcaagggcaccatcgcctgccagatccaccccgtgttcgtgggctcgtcctacaagaacaagggcgtgcaggagctcctcgacgccgtggtcgactacatgccgtccccgatcgacgtgccggccatcaagggcacgaacccggacacgggcgaggaagacgagcgtccctccgacgtgaaggcgccgttctccgctctggccttcaagatcatgacggatccgttcgtgggcaagctcacctacctccgcgtgtactcgggccagctcgattccggctcctacgtgtccaacgcctcgaagggcaagaaggagcgcatcggccgtttgctgcagatgcactcgaaccagcgcgtcgatatcgacggctgcgccgcgggcgacatcgtcgccgtcgtgggcttgaaggacacgtcgaccggcgacacgctgtgcgacgctgatcatccgatcatcctcgagtccatggagttcgccgagccggtcatcgacatcgccgtcgagccgaagacgaaggccgagcaggacaagatgggcatcgcgctgcagaagctggccgaggaggacccgacgttccgcgtgtccaccaaccaggagaccggccagaccatcatcgccggcatgggcgagctgcacctcgagatcatcgtcgaccgcctgctgcgcgagttcaaggtcgaggcgaacgtgggcaagcctcaggtcgcctaccgcgagacggccacgcaggaagctcgcaacgtcgagggcaagttcgtgcgccagtccggcggtcgcggccagtacggccatgcggtcatcaacctgatcccgcaggaagccggcaagggctacgagttcgagaacaagatcgtgggcggcgtgatccccaaggagtacatcaccccgatcgacaagggcatccaggaagccatcaactcgggcgtgcttgcgggctacccggtcgtggacatcaagatcgagcttatcgacggttcgtaccacgacgtcgactcctccgaggcggcgttcaaggtcgccggttcgatggcggtcaaggctgcgctcaagaaggccgctccggtcattctcgagccgatgatggccgtcgaggtcgagacgcccgaggagtacatgggcgacgtcatgggcaacctgtccagccgtcgcggccagatccagggcatgggcgatcgcggcaacgccaagaccatcaaggcgaaggttccgctgtccgagatgttcggttacgccaccgacctgcgttcgacgacgcagggccgcgcttcgtacacgatgcagttcgattcgtacgaggcagtgccgaagaacgtggcggaggaaattatcagcaaggccggcggcaacgcctagggcgtgcgcgcgagcataacggaggtaaagtaagtggctaatcaaaagattcgcatccgcttgaaggggtacgatcatgagatcgtggaccagtccacgaagctcatcgtcgataccgcgcagaagacgggtgccaaggtgtccggtcctatcccgctgccgacggagcgcaacctgtactgcgtcgtcaagggcccgcacgtcgacaaggattcgcgcgagcagttcgagatgcgcacgcacaagcgcctcatcgacatcctggaaccgaccccgaacacggtcgattccctgatgcgcctcgatctccctgccggcgtcgacatcgagatcaagctgtaaagggggatgtgcgatatgatcaacgccatctatggtaagaaaatcggcatgacccagatcttcaacgaggacgaccgtgtcgtgcccgtgacggtgatccaggccgagccgaacacgatctgccaggtcaagacgaaggacagcgacggctacgaggccgtgcagctgggcttcggcgccatcaaggagaagaaggtcaacaagcccatggcgggtcacttcgccaagcagggcacggctcctacgcgctacctgcgcgaggtgcgcgtcgagaacgccggcgagtacaaggtgggcgaccagcagacggtggccgccttcgctgagacgaagaaggtcgacgtgaccggcacgtccaagggcaagggcttcgccggcgtcatgaagcgctacggcttccgcggcggcccgggcggccacggcgcgcacttccatcgcgctcccggttcggtgggccagtgcgccacgccgtcccgcgtgttcaaggggctcaagctcccgggccacatgggcgtcgacaccgtgaccgtgaagaacctggaagtcgtccgcatcgacgaggagcagaacctcatcctcgtcaagggcgccatccccggcggcaagaacggcgtcgttcgcgtccgcatggcgtagttgaagtaacctataaggagcttgtatatcatgacgactatcgagatcaaagacgcgagcgggaagaaggccggcaccgccgacctcgccgcttccgtgttcggcatcgagccgaacgtgcccgtcatgcaccaggtcgtgcgcgcgcagcgcgcgtcttggcgccagggcacgcatgacacgaagacgcgcggccaggtgcgcggcggcggcaagaagccgtggcgccagaagggcaccggccgtgcccgtcagggcaccatccgcgcccctcagtgggccggcggcggtaccgtgttcggcccgcatccgcgttcctacgcgttccgcgtgaacaacaaggaggtcaagctggccatgcgctccgcgctgtccgccaagctggccgacggcgagctgttcgtggtcgacgcgttcaacttcgagaagccctcgacgaaggcggctgtggccgcgctcaaggccctcggcttggagcgtcgcaccaccctcgtcatcgacgacgaggacgtgaacacctatctgtcgttccgcaacatccccacggtgaacatcctgcccgtgtccgcggcgaacacctacgagctgatcgacaacaaggctctcgtgttcacggccgacgccctgaagcgcatcgaggaggtgcttgcataatgaaggatccccgcgaggtcatcatccgccccgtcatcacggagcacagctacgaccagatggagggcaacacctttaccttcgaggtggccaaggacgccaacaaggttgagatccgccaggccatcgaagccatcttcgatgtgacggtggtcaaggtgaacacgctcaacgtgaagccgaagccgaagcgcgttcgctaccagctgggcaagacccgcacctggaagaaggccatggtcacgctcaaggaaggcgacaccatcgagctgttcgcgtaagcgacgtttccacgtgctgcctcggcgcccctgcaatcgcgggggcgccttttttgttggaggagggtgcgaaaagcgaaccgcgacgccttctttgacgtgccgtatcgccttggagtcgttacttcaccacgcggacgcggcggacgccctcgatggcgctcaggcgctcgatggcgtcatcgggatgccccggagtgccggcgtccaggtcgagcatcgtgtaggcgttctcgccgcgggccttgttcatcatgttctcgatgttcacgccggcatcgccgaacacgttcgtgatgcgagcgatggcgttcgggacgttcgcgtgcagcacggccacgcggcgcaggccgtcgggcacgggacccatgtcgcaggcggggtagttcacggagttcgcgatattgccgttctccaggtagtccatgagctcccgcacggccatcatcgcgcagttgtcctcggcctcggcggtagaggcgcccaggtggggcagcacgatggcgcgctccatcttcatgacctcgggcgtggcgaagtcggtgatgtaggcatgcaccttgccggagtccagcgcggcggccatggcagcgttgtccacgagcgtgtcgcgcgagaagttcaggaacacggcgccgtctttcatgagcgagcaggcgcgttcgtcgatcatgccgatagtgccctccatggccggcacgtggatggtcatgtagtcgcaggtgcggaaaatgtcgtcgaggttcgtcacgtgatggacggcgctcgagatgcgccatgctgcgcccaccgacacgtacggatcgtacccgtacacgtccatgcccagatcgatggcgatgtttgcgacttccgccccgatggcgcccaggcctatgacacccagcttctttcccttcacctcgcgtccggcgaacgccttcttcgccttctcggcggctttcgcgatgttctcgtcggcggcgttgtggcggcaccaggcgatgccgccggcgatgtcgcggctgcccaacatgaggccgcacaccacgatctccttcacggcgttcgcgttcgcgccgggggtgttgaacaccacgatgccctcttcggcgcaacggtcgagcgggatgttgttcacgccggcgcccgcgcgggcaatggcctggaggctttcggggaacacggtgtcgtgcagggcggcactgcggacgagcacgccttccgcctgggtgaggtcgtcgacgagctggtagtcgtcggtgagcaggtcggtgccgtacgccgagatgttgttgaggcagtggatgttgcgcatgaggtctccttcgaggatggcagacgtcaccgatgacgcgcggctcgtcgccgtttcttgctgcatcctcctatagtgcgcaggtcgcaacccgttgtcaaccaccgttcagcgggttcgcgctttatctcggtaaagtgcgaacccgcttcgtcctcgcgtcgccgttcggtgctagttctgcgtggaaaggaaggtgggcagcgtcatctgctcgatctgatcctgcagctcttccagctcgtcgaggtgcgtgtcctcgtcgcgaaggatggcttcgaggatgtcgcgcgtggcatagtccagcacctggccggccagcacgatggcctcgttgtactgcctgatcgcatcgagctccaaggcgtggtcgttgttcacctgctgggggatctccgcgccgatgtgcatgtcgttgaggtgggatacgatgggcgtgccctccaggaacaggatgcgctcgatgaggcgctcggcatgcttcatctcggtgatcgagcgcttcttgaaattctcgctcaggcgggtgtagccccagtcctcggccatctcggcatgtaccatgtactggttgatggaggtcagctcgctggcaagcagaccgttcagcgcgtcgacaagttcttggtttcccttcatggcagtgctccttccatacgcacgatgatagggaggatccgccctttgtaagatcctcgacctcagcattgtacggacaagggaccggcttgttcgcttgcttaccgactcgcatccgtcccgtgttcttctcgaaacctgtcgttctggtttttgaagaccgtgcgaagggttatcggggatttgacaggtgtgctagaataatcggctggtattgctatgttggaagggacgtatatgtctgggcattcaaagtgggctacaacgaaacatcgcaaggcggcgcaggatgcgaagcgctcggccttgttctccaagctgtcgcgcaacatcacggtggctgcgaaagaaggcggcgacccgaatcccgacaacaacgcatcgcttgcggccgccatcgaaaaggccaagggctactccctgccgaaagataagatcaaagtcgccatcgacaaggcgttcggctccggcaaggactccgctaactacgagaccgtcgtgtacgagggctacggtccggccggcgtcgccgtgctgtgcgaggctctgaccgacaaccgcaaccgcaccgccgccgacgtgcgcgcggccttcagccatgcgggcggcaacctgggcacgtccggctccgttgcgttccagttcgagcgcaaaggccagatcatggttcccaaagaggtcgagaccggcgacaagaagaaccccgtgaagccgaacggcgccgccgccgacgaggaagagttcatgctcgctgtggccgaggccggcggcgacgattacgaggacgccgaggacgagtggatcgtctacacgtcgcccaccgatctcatggccgtgaagaaggcgctcgaggaagccgacgtcgtcacgaagggcgccgaaatgaccatggtgcccactacgcccgcgacggtgagcgtgtccgatgcgaagaaggtcatgcgccttgtcgaccgcctcgaagagctggaagacctccagaacgtctaccacgtcatggatatcactgacgagattgcagaagctctggacgaataggctctctcgaaaccaagcgaacgcgaagccgccgcaagcacgaagcttgcggcggctttctcatgcggggttggacgaagggcgtaagcgccggagcgtccggtatcgccgacaccttgtcgctcgaaagccgcgttttcggcctcgattccgcggctttcgagcgacaacggcgcggcatgcgaccgtgggctccgagtctcgcctgcccagcctgcggtctcccgttcttcgctgccgccgttgtgtataatagctggttgcttgcttgattatcaattgccgcgcttttcgcgcgaaggggattcaggattacggatatgctagaagcactcgctcgtcttttctcgtacatcgttcagccttgctacgatctgacaggaagctggtggatggctattttgctgttcaccgtgatcatcaagatcgttctcatgccgctgtcgctttggtgccagtggaacagcatcgtcatggtcaagatcatgccggagctcaaccgcatcaaagtgaagtacttcggcgacgccgaaaccatcggcgagaagcagaccttgctgaacaagaagcaccactatcatcctctgctgtcgctcattccgttggcggcgcagattctcgtgctgttcgggctggtggaagtgattcacggcatcaccgaccacggcgctccgggaaccgagttcttgggcatggtgccgattgaagacggagggctttcttggatcatgccgcttctggccggtttgtccgcggtggtgatgggcttcgcgcagaacaggatcaacccgctgcagcgcgagcagtcgaagatggagaagaacaccaccaacgggctgtccatcgtgttgtccctcgtcctgggcgtgtacgtggccgccggcatggccttctactggatatgctcgaacctgatggccatcgttgtacaggccctgtgcaacctgatcatgcggccagcgaagtatatcgactatgccgaactcgctgcaagtcgtgtggagctggacgagctcaacgctttcacggcgcgtaaaacgccttggtacaagcgcgatccgctggcgaagcgcgagaaggaggactacaggcgcttcatgagcgtggtcggcaagcatatcgtgttctactccgagcgcagcggcttctacaagtactttcagggcgccgtcgaatggctgctggcgaactccgatgcgtgcgttcactacgttaccagcgatcccaacgaccaggtgttcaagctgcatgaggcaaatccccgcctcatgccgtactacatcggcgacaagcgcctgatcacgctcatgatgaaactcgattgcgacgttgccgtgatgacgctggacgatctggagaatttctacatcaagcgttcgtatattcgcaaagacatcgagtacgtgtacgcgttccatcatatgacgtccacgcacttggtgtgcacgaaggaggctttcgaccactacgacaccgttctgtgcgtgggcccgcatcagaaggcggagctcgaacgggccggggagatgcgggatatccctcgtcgcaatctcgtggaatgcggctacgacctgctcgatcggcagatcgcggcctacgagtcgcgcaaggccgcgaaagctgccgagggcgccgggtcgcgtcgtcccgtcgtgctcgtcgctccgtcgtggcaggaggactgcctgctcgacctgtgcgccgacgaggtgctcgagcccttgctgggacgcgggttcagcgtgatcgtgcgtccgcatcccgagtacaccaagcgctatcacgcccggtgggagtcgctgcagcagcgctacgcgtcgtggtcgcgcgacgacatctacttcgagcaggacttcagcacgtccgattcggtctacgatgccgacgtgctggtcaccgactggtcctccatcgcctgcgagttctccttcaccacgatgaagccgtgcgtgttcgtggacacgcccatgaaggtgaccaaccccgattgggaagagctgggcatcgagcccgccgatctggccatccgcaatcaaatcggcgcgtcgctggccatggaggagctgccgcggttgggcgatgtcgtggaggacatggttgcccgccccgaagcctggcggaaccgtatcgaggaggtgcgttcgcgcatgatctaccataagggtcgcgggggcgagatcgccggcgcatatctgcttgaccgcatgctggcgaagcagggcgaccgggccgtcgaggcgtccggagcatcccggctggatagggctggcgtagccggctggatcgacgaggaggtgcgtcatgcgggatagcagcctgccgcgcttcgctgcgcgcatcggccttgtggcgtccgacgtcgcgttcccccttgtcatcgctctggttttgacgctgggtttcgcctcgccggcctacgcctacgtcgacccttcggtcatgacctacaccatacaggcgctggcgggcgtcgcggtggcgctttcggctgtgctcggcgtcgtttggcgccgcatgcgcagacatcttctgcatattctgcgcatcgacgagaacgagggaaaacaggttgaaggcgcggtacacgcgctcgatccgcttgcgttcgattaccgagaccgcctcgatagggcggaatcggaagcgcgcaggatgaaggccaagcaagcgtcgaacaagcctgagacgctgtgctggcgtgcgcgcttcctgttctcgctggtggcttcgctgatgctggtctacactttcgcagtggtggctccgctggaaatcgtcgccagcagcgttaacagcctgcttttcacggtgacggacgtctgggttcccttcgccgtcgtcgggctcgcgggcactgtcgtgctagccttagcgttgtcgctgttgcggggaagggcgttcaacgtgtgcttcgcggttgtggcggccgtgggcgtggccggctttgtgcaggccctgttcctgaacggatcgcttcccgcagccgacggcacgcaggtggtttgggacgactacaccacggccaccgtggtgagcgccgtcgtgtggatcgtcctcatcgggtcggcggtgttcctgtcgctgaggaagtcgctggcgttcaagggcacggccgccgcgctgtgcctggtgggcgtcgtcgcgcaatcggtgagcctgggagtcctgctcaccgcgccggcgcccgacggcctaccccctgtcgcggcgaggcactccgtcaccaccgacggcgtctcggaggtttcgtcgaacggcaacataatcatgttcgtacttgatacgtacgacacgctgtttttggaggagggcctggaggaagagcccggctgcctcgacgagttcaccgggttcacctggttcgacaactccacaggctcgatgatccccacgcgctacgccatggcctcgattctgacggggcacgctctcgacgaggacgacaagggcttctccacgtcgttgatcatcgactggtacgagcagcatggcctgatcgacgacatcaacgcgcagggatacgagacgtgcttgtatgccaccgacatcaacgatgccatcggctccctgtccgatcgggtggagaacatcaagcttcgcgagaaccggctggactatccgtcggcggttgcgatgctggtgaagtgttcgctgtaccgcgatctgccttgggcgctgaagccgccgttctggttctacaccgacgaggtgaacagcgccgcgctgggaagcggcgccgagagcgccgtgaacgcgctgtggaccatggacgacgcgcgctactacgctactctcaaagagcagggactgagcgccgccgacctcgatgggaaggggagcttccgcgtcatacacctggcaggtccccatccgccgtacacgttgaaccgcaatgccgagacggtggagggcggaaccggcgccatcgagcaagggctcggctccctccatatcgtgagcgagtaccttgaggagcttaagcggctgggcttgtacgacgaagccaccatcgtggtgaccgctgaccatggcgagtggtacatcgctgaagacatagtgcgtccgacaagccccatcatgctggtgaagccttcgacgcagccggacggctcggacgagcccgtgaagcgctcttcggtgcctacggggcacgtcgatctcgcggctacgctgctcgaagccgccgggggcgatgcctccgcatacggcgggatgagcgtgtttgacgtgcccgacgctccgcgcacccgctactacaacgcctcgtcggtggtgggtcccgagcacgtgtacacgtccatcattcagtgggagatcgagggcgatgcgatgaactgggacgattggcgcgaaaccggtgtgaaatggcccatcggctgatcgtgccgcgccgcttccgccgtcggcctctgacgaggctgtgaaaaagcgcgtcttccgagggctgactccgaggctttgtgctaggatgtgaacgaacaaacgtttgcaaccgaaacgcggccgctgcaacatgccccgcgcgacgacgagaaggaaccgatgacgcgcaccgaacgaaccatcctaggcatcgatcccggcctggccaacacgggttggggcatcgtcgagcagtgcggtccgcgcctcgcgtgcacggcgtacggctgcgtgtccacagcgaaggacctgccgctggcccagcgcctgcggaagatccacgagcagatggccgcggtgatcgcgcggttcgaaccggcgtgcgtgggcatcgagacggtgtggttcggcgtgaacgtgcagagcgcgttcgccacggggcaggcacgcggcgcggcgctcgtggcctgcgccgagcgcgatctcgaggtgctcgagttctcgcccagccagatcaagctggcggtggtgggcacgggttcggccgagaaggaccaggtgcagtacatggtgcgccagctgctggcgctcgaggacgtcccgcggcccgaccacgccgccgacgcgctggcggccgccatctgctacaccacccacgagggctttgcgcgccgcacgggcgcggcgtgcgctgcctacgacgttcccgatcgcggcattctcgcgtgcggtgcttccgctggaaaggacaggctatgatcgcgtttctcaaaggggtgctggcggccaagacggccacgaccgccttcatcgaggtgaacggcgtgggctacgccgtgggcatgtcccaggccagtctgtcgaagctgcccgaggcgggcgcggcggtggaggtgcatacgttcctccaggtgcgcgacgacggactgtcgttgttcggcttccttacgctggaagagaaagcgctgttcgagcggctcatcggcgtgggcggcgtggggccgaaggtggcgctcgccgcgctgtcggcgttctcgcccgcgggcctcgtggccgccgtgcaggcgcaggacgtggccgcggtgcagcgcattcccggcgtgggcaagaagacggcctcgcgcatcatcctcgagctgaagggttcgttcgacgaaggcctggcgggcctgttcgacgaggcggcgcccgcggtcgcgtcggcggcgaacctcgcgggcacgcgggaggcgctgctgtcgatgggcttcacgtccgaggaggccgacgtcgcgctcaagggcgctcccgaaggcgcggccgaaagcgtgctgctacaatatgcgctgaagcgattagggacgaactaggcgaagccgggcggcgctgcgcgcgccgtcgggacggataggcggctatggctgacaacggcattgaaatagaagggctcgtgttcgaagcgggcgcggggcgaagcgacgactcgctcgtcgacgctcgctcgcgcgccgtgacgcctgcgctcaccgaggacgacctcgcgctcgaccgcagcctgcgccccaagcgcctgggcgactacctgggccagacgaagatcaaggagtcgctcgccattctcatcggggccgcgcaggcgcgcggcgacgtggtggaccacatcctgttctcggggcctccgggcctcggcaagaccacgctcgcggccgtcgtggccaacgagctgggcgcgaacatcaagacgacgagcggccccgccatcgagcgcacgggcgatctcgcggccatcctcacgaacctcgaagagggcgacgtgctgttcatcgacgagatccatcgcttgaaccgcatggtggaggaggtgctctaccccgcgctcgaggacttcgctctcgacatcgtggtggggaagggaccggcggcgcgctccatccgcctcgacctgccgcgcttcacgctcgtcggcgccacgacgcgcaccgggctgttgacgggccccttgcgcgaccgcttcggcatcgcgttccgcttgcagtactattcgcccgaggagctggcctccatcgtgcgccgctcggcgtccatcctggacgtcgctatcgaggaagacggcgcgctcgagatcgcacgccgcagccgcggcacgccgcgcttggcgaaccggctgctcaagcgcgtgcgcgactgggcgcaggtgcgcggcgacggcgtcatcgacgaggacgtggccgctcaggcgctcagcttcttcgaggtggacgcgctcggtttggacgcggtggacaatcgcatcctcgagctcttggccgtgcagttcggcgggcggcccgtgggtctgaccacgctcgcgtcggcgctgtcggaagacaccgatacgctcgaggacgtgtacgagccctacctcatgcagcagggcctgctcgtgcgcacgccgaagggccgcatctgcaccgagcgggcctacgaccacttgggaatcaaggtcccgtcatcctcgtaacctcggtgcccgggcttgcccgggcctttgaaaggagctcgcatgctcgaacaggattatctcatgcgcatcttgctgcagttcgcggaagccatccgtcgcagctggtcgcgggcggtggaggatcgcgacccgcgcgacgccgccaacatgttggagcgcgccgtgggcgacgccaccgatatcgacggtgccacgctgttgtcgctgtcgccggagtccattgcgagcgtcatgcaggtgtcgggggtcgacccgcgcgtgtccgagtacatcgcgcgcagcttgctgctggcttcgggctacctgggagaggccggcgagcacgagctggccgccctgcgcgccgagcaggcgcgcgcactggccgtcgcctacgacctcgacctgcccgatacgcccgaagagctggcgctgctgctggacgaggccgacgcggagcttgcgcaggaggccgattccaccatggacgtgctgggctacggcaccgagcccgtcatcccgtcggctgtgatagaagcgcctctcgactccgaccgataagcgcggtcgataaccctcatgcaacggatcggtaaaataaggacgaaaaagagaatcccgagctttttcggtgtcgcatagcgtatagtaagcatgtgccctcgaggtgagggcgagtgttgcggccatgcagcacacagtgttacctcctcggggacgaggagaggaaagaggatttaaaatggcggaaggtactgttaagtggttcaacccggaaaagggctacggcttcatctctcagaaggatggcgaagatctcttcgtgcatttctccgagatcaagatggacggcttcaagacgcttgacgaaggtgctgcggtgcagttcgacgtcacgaccggtcagaatggcaagcttcaggcaagcaacgtgacgaaggcataagcagactaactatagaatgctgaaatggccccgcaaacgcggggccatttttttgcgctcgggatgtctgctcgagctgcgcgcattcgctcgaaacgcacgttacaacctgctggagcgtgtgtttcgggcgaatgcgcagcttcggaacggcggctgggccgtacctagcagatgaacatggcgtcgccgaaggagagcatgcggtagcgctcctcgatggcatggcggtaggcggccatgatgtgctcgcgcgtggagaacgcggacacgagcatcatgagcgtggagcggggcacgtggaagttcgtgatgagggcgtccaccacgtggaattgcgagccgggcaagaggtagagcgacgtcgtctcgcgatcacgcggcgtgactgctcccgtcccgtcgtcccaggcgctttccaggcttcgcacgctcgtcgtgcctacggcgacgacgcgcccgccgcgctcgcgcgtctcggcgatagcctccaccgtgcgctcgggcaccgtgtagtactcggtgtggatggcgtgctgcgtcgggtcgtcctcgtccacgatgcggaacgtgtcgaggcccacttcgagctcgacggtctcccagcgcacgccctgctcgcgcagacgctcgatgagcgcgggagtgaagtgcaggcccgcagtgggcgcggcggccgagctctcgcggcgggagtacaccgtctggtacagctcctcgtcgccggcgtagtccttgatgtagggcggcagcggcgtgtggcccacggcgtgcagcgcttcgtcgagggagggcagcggcgtggtcaggcgcgcgaggcgctcgcctttctgggcgtcgggcagccagtcgacgatctcggccgacagcgccacctcgcctacggcgtcgacgaagtcgacgacggcgcccgtgcccggcttcaggcgcttgccgggacgcacgagcacttcccacaacgcgcttcggttctccgtcggcgtgccgtgctggcgcagcaggaacacctcggccgctccgcccgtgccgcgcttcgcgcccagcaggcgggcgggcatgacgcgcgtctcgttcgccacgagcaggtcgttcggggttaggtagtcgacgatgtcgcggaagacgcgatcctcgacctcgccggtgactcggttcatcacgagcaggcggcagccgtcccgctcggcggctggctcctgcgcgatgagctcagggggcaggtcgtaatcgaaatcagaggttttcatgcgtgcttccttcgtgctttgtgagatcggcggtgcgaactgcctattataggccttgttgcccgccgatgggcgcttatccttcccacttcatctcgtaccagcattccagggacaatcccggcacgcgcttgaactcgtccatgttgttcgttacgaggacggcgttgtttgcgagcgcggttgcggcgatgaagagatcgttgtggccgatcttcttcccgctccgctcaagaagcgcgcgaatccggccgtattcgcgcgcgcaatcggagtcgaatggcagcacgtcgaaggggagcgtgaattcgtcgacgagccagcgcgccttctccggtcgagagcttttctccacgccgacgagcagctcgccttccacgatggctggaattttgaacaggcgcgggtcgctgtttcgcataagatcgtaggcgtaaggcaaccgtcctcgcaagaagtcgatgcagatgcagctatcgagcaggtacatcgctacgccagctccagagcgggaatgggatcgagatcgaaaggctcgtctggcggctcgaccagcacgccgtcctcgcaagcgccgtacaggttgaagaacccgtgcggccaacggttgttctcagcgtggtccttgagcacgcccgccacgaacttcgagagcgtcttcccctcgcgcgaggcgtcctggcgcaagccttccatcatgggatcgtccaaatacagggaaagctggggcatcgtcgctccttccgtcgaacaggctatcactatacttggaagtatacttggttcgacggtagaatgcaagcacgcctacccctcgctgcgctcctggtcgcgcagcgccttcaacacggcgcgcttgcgggcctgcttggcgtcgtaggcggcgcgctcggccttccgggcgatccgctcggcttcggcggcggcgcgctcggcggcatggagggcggcttccgccttgcgggccgccgctcgctcggccttgcgctcggcgcgctcggcggcggcctcggcgtccgagaagcggcagccgcagtagttctggcggtacattcttaagctccggctgcggtgcgtggcctcgtcgtagaacgggcggtaatcctcgaacagcggccgcacgcccgcggcggaggctgcgcgctccagctcctcgcggatgacgtcggtgtattggtaggggctcaccgaaagcgtggtgcccaccgcgtcgaacccctgctcggcggcgagcgcggcggcctcttcgaagcgcaggcggtagcacgcgcggcagcgcgcctcgcggcggacggggtcgtgcgccgcctcgccgacgcgtcccgcgctcgcctcccaggcggccgggtcgtaagcgccctccaccacgggcacctgctcgtctgcggcccaagcgcgcagcgtggccagacggcgcgcgtactcgtcggcaggcgcgatgttcgaattgagataggcgatggtcaggtcgtgcccggccgcgcgcagcaggcgcacgggttcgagcgagcacggtccgcagcaggcatgaagcagtaatttcatcgggtttccacgctccttcgcaacgtgacgtatactaccatgcttgcaagcgtattcatcgaatcaaaggatcgacgccatggcatctcgcacctaccgcgcaatcttcttcgacttggacggcacgctcttgcccatggagctcgacgagttcctgggcgcctacttcgaagccatcgcgaacttcgtcgccgcgcacgggctggacgcggcgacgttctcggccgggctcaaggcggggatcaaggccatggccgtccacgacgacggccgtacgaacgccgatgcatattgggaggcgttcttcagccacgccgatcgcgatgccgcagactgggacgagctgctcgccggcttctacgagcgcgacttcggcgcgatcggcgcaggcgtcgtccccaactcggccgcggcgcgcgccatcgagacgctggctgcgaaggggtacccgctcgtgctggcaaccatgcccatgttcccgcgccgcgccgtggaatggcgtctgtcgtgggcgggcatcgacgcctcccgcttcgggcgcatcacgtcgttcgagaattccacgtcggtgaagccgaagctggcctactacgccgagaacgtggcggcgtgcggcctcgccggcgaagacgtgctcatggtgggcaacaacacggtggaggacctggccatccggggactcggcgccgacgcgttcctcgtgaccgatcacctcctcgacccggacgaaggcttcgatctggcttccgtcaagcacggcaccatggaggagttcgccgcttgggccgaggcgctgcccgcgtgcgccgaccccgcgcagggcatcgaggcgggcatcgtcgaagccgcggcacgcgcggccgtcctgtcccgcgcagaggaggcctagcatgacgttgttcgactgcgaactccaggcgacgagcggccacgcccgcgcgctgtcctacgaaacggcgcacgggtcgttccagacgccgatgttcatgccggtgggcacgagcgcaagcgtgaagggcgtcaccgtgggccagctgaacgacctcggcagccaggtggtgctggccaacacgtaccacctgtcgctgcgccccggcgccgacgtggtggccgaggcgggaggggtgcaccgtttcatgaactacgacggccccatgctcaccgattcgggcgggttccaggtgttcagcctggccgacacgctcaagctggacgacgagggcctcacgttccgctccatctacgacggcacgaaggtgcgctggacgcccgagagcaacatggagatccagcagcagctgggcgccgacatcgccatgcagctcgaccaatgcacgccctacccggccgagaaggccttcgtggcgaaggccgtggacctgtcggccaactgggcgcgtcgctgcctggccgcgcacacccggcccgaccagacgctgttcggcatcgtgcagggcggcatggagctggacctgcggctggaatccgtccgccgcttgcgcgagatcgaggacgagagcctggcgcgcggcgggcgccgtttcggcggtttcggcatcgggggctattcggtgggcgaggaccacgaggtgatgttcgaaacgctgggccccgtcgcccgcgcgtgcccggaggaccgcccgcgctacctcatgggcgtgggcaaccccacgacgctcgtgcgcgcggtgcgcgagggcgtggacatgttcgactgcgtgctgcccacccgtacggcccgcatgggcacggcgttctcgtcggaaggacgcatgaacatgcgcaacgcgaagttcacgcgcgatttcggcccgctcgaccccgcgtgcacgtgcccgacgtgccgaaaccacagccgcgcctacatccgccacctcgtgaagcagaacgagatgctcggcggcatcctcctgtccgtccacaacctgcactacctcatcgacctcatgcgccgtgcccgcgaagcggtggtggcgggagcgtacgaggagttttacgaagcgtggatggccagctctgcggcgaaggattactaaagaagcgcgcgggcgggcatcatccctgaccaacgtcgtaacctaaccgtagggattagccctgatcttttcggcacccttcctttcgcattctcctgcgttgtggcacaatgggacagttaccgtgcgccgggccgcgagcccgcgcatgacgcacgcgagagaagctcaacgagggagaacgtcacatggcggcaacgcagaggacgaagaagaaacccgcccggcccaccgaccggcgcaacatctggctgctcatcatcacgaccctgctggtgctgggttccgtcttcatgttcacgccgccccaggagaagatcaaccagggcctcgacatccagggcggcctgtcggtcgtgctcacggcgaagggcgcagacggggctgccgtgtcgaacgacgacatggagaagagccgcgccatcatcgagagccgcgtgaacgcgctgggcgcctcggaggccgtggtgcaggtgcagggcaccgaccagatcctcgtgcagatccccggcctcaccaacaccgaggacgcgctcaacaccatcggcaagaccggcaagctcgaattcgcgcgcctcgactcgttcaccgatgaggacgtgaagacgaagatcgagaacggcgagtacgccggcgaggggaccgtgtccgacgatttgggcgtgctcacgctgccgtcgggcgagacgcagcacctcacggtggaagacggcacgtatacgcccatcgtcaccggcgcggacatcacgaaggtggacatcggcaagccctccgagacttccaccgactacgccgtgaacatcacgctcgacgcggaaggcgccaaggcgttcgcggacgccacgaaggagcttgcgcccacgaagggcaagatcgtcatcatcctggacaacgaggtgcagtccgcccccgccgtccagtccgagatccccgacggcaacgtgcagatcacgggcgggtactcgctcgacgaggccaaggcgatgcagaccgtgctggaaagcggctcgctgcccgtcagcttcgaatacgcccagagccagaccgtgggcccgacgctcggccaggacgcgctcgcatccggtgtgctggtggcgctcatcggccttgcggtggtcatgctgtacctgctgttcttctaccgcggcctgggcctcatcaccgcggcggccatgatcgtgttcgcggtgctgtacctgggcatcctggccacgctgtcgtcgttcggcctgttcagcctctcgctcgcgggcatcgcgggcatcgtgctgaccatcggcatggcggccgactcgtccatcctcaccatggagcgcttccgcgaggagatccgcatggggcgcagcgtgcgcgccgcgtccgtgacgggcgtgaagcacgccatcgtgacttccatcgacgccgacctcgtcacgctcgtgtcggcgctgtcgctgttcttcctggccagcgcgtcggtcaagggcttcggcctgacgctggcgctgggcatcgcatgcgacatcgccatgatgctgctgttcaaggcgcccctcatccgcttgctggcgccgaaggtcatcgcgcgccatccgggcttctggggcatcaaggacagcctggccgcatcgaaggactacgcggcgctcgccgccgccgagggcacgagcacggctgcggccgaagcgggcgaggccatcaacgccgccgaatccgaggaagccgccgagcgccgcgagggcgcggcgggcgaggccgccgcgcaggcggcgcgcaagccccgcggcaagttcatcaagcacgacatcaacttcctgggctaccgccgcgtgttcctcggcgtggccgcggttctggtgtgcgtgtcgctggccatcgtgggcgtgaaggggctgaacttcggcatcgagttcgtgggcggcacgtcggtgtcgttccacagcacgggcgacgtgaacaccgagcagatgcgcagcgccttcgacgaggcgggcgagcccgacgccgtggtgcagaccaccaccgccgacggcgaccagggcttcctcgtgcgcaccaccaccacgagcgccgaagaggccacgcagcgcgcgaaccaggtggcggacaagctggggctgtccaccgacagcttcgaggtgaccaccatcggacccgactggggcgccagcgtcatccagtcgtcgctcatcgcgttcctcgtgtccatcgtgctcatcatcatctacatcgccatccgcttcgaatacaagatgggcgtcaccgccatcgtggcgctgctgcacgacctcgtgctggtcatgggcgtgtacgcgctcgtgggccgcgaggtgaacccgaacaccatcgctgcgctgctcaccattctgggctactcgctgtacgatacggtggtcgtgttccaccgcatcaacgacaacatgcagtccgacgacatcaagtgcacgttcatgacgatggcgaaccactccatcaaccaggtgctcgtgcgcaccatcaacacgacactcacctcgctcatccccgtgctggccatgctgctgttcggcggcgagacgctcaaggacttcgcgttcgccatggtcatcggcctcgtgtgcggctcgtactcgtccatcgcggtggcgtcgcccttgtacgcgatgtggaagacgcgcgagccgcgctaccagaagctcgtgaagaagttcgggcccgaggtgggtcgcttcgagttcggcaacccgaacgcgatggcgacggcgctcgcgggcaagaaggccgtcaaggccacggccgccccgacggctgccccgacggtcggggccgcggcggagaagccgacggtcgaggagccgcacggcgcgaccgccgcgaagagcgcgccgaagcccccgaagggcaagcgcaagaagcgccccgacaagaagtaacgccaacggccccggacatccggggccgttgctttttatcgctcgaacagctcgaacagttcctcgcggctgtgcaccccgagcttcttgtacacgtggcggatgtgggacttcgccgtgccgttggcgatggtcatctcggtcgcgatctcgctggcggtcttctgccgcaacagcagttcgagcacctcgtgctcgcgattgccgaggttgcatcgcgcggacacctgcgtcaagcgcgccgcctgctcgtcgctcaagccatccttctcgttcgtccggtcggggtcgaacagggcgatcagctgcttgggcatgaatccgttgcggatgcagaggaacatggccatgagcaccgcgagcaccgacgacagcacgatgacgtcgtgcacgcgtgccgattcggacatcgcccatgccgcgaccgccctgccgacgatgcatccgccgaagtagctcaacatgagcgtcgagaatgcccggtatgcgtgcgcgtcggtcttctcggtgatggcgcacaggagcaccaccgcgtacgcgaggaacagcaggatgccgatgagggcgaggtcgaacgtgaccacgggattgagatccaggaacgatgccgacagcgtggcggtcacgacgatgggcacggcgacgttgagcagcgacagggcagtgagccgtttgaaggagagcatgagcacgctgaccagcaagaaggggatgaggatgacgatggccgagaacgcgagggagaagtgctcgagcccggcgaaggacagcgagaccatgaaggcgtagctgaacaggagcgtgccgacgatgatgtgtgcgggcgtgtgcccttcggtgctcagcgaggactgatcgaggcgggagccttgcagaaggcgcatgcgtttcgtcagcgtgtaggcgccgatgcccagcagtgcgacgaggctgcacgccacccgcggcgtgtccatgcctacgatgaaccacagcatgatcgatccgaccaacgcggagaatacgacgttccagatgacggtggccgcgctgtggtgcgcgtacacccacagccagcatacggccacgacggagaggtagatgccgaacacgcctccgcccaccaaggcgatcagcaggggggagaggtacgacagggcggggaagagcgcgagcgcgaggatgctggccagcacgcaggcgcttgagatccagatgacggccggttgcgcgaaagcgggtcgatcgcgtctcgagaaggtgagcagcacgagcgaggtgagcgcgccgaacaggcatgtcacgtcggagaacgacaacgcttcgggcgaggtgtgggcgagtgcgggggtatagtgcgtgtacgacacgagcgcgatggtgcacgacgtgccgacgaacagcccgtccgctacgattttctcccgcgtgctcaccaaggcgcttcgcagcttcgcgatgacgctcgaacgtcgctcgttccccatacgcactcccctccagaagctttcttcacgacggtatcccatcacggatgattcagctagggataaagcgctaacccgtacaggggttagcgggggttagcgccctcggtcagcgaaatgcccctcgccccgcaagattaccgattccttaacccggggtcgggcgcataggatcgtcatcgggccgagcgctgcgagcgattggcggccccaggaagtaccagcgaggaaaggggacatcatgcacgaccatgaaaacctgcacgaacagggaatatcccgtcgaggattcctgaccggagcggcgatggtgggcgcgggcgcagcgcttgggcttgccggctgcagcggctcgccggaggccgagaccaaggcgcctgccgaggaagcgaagccggcgtcggaaccggctgcgacgacgtccgcggcaagcaaccagcccgcgttcctcacgccgccggatcccattccggagagcgagatcatcgaaaccgtcgactgcgacatcgtcatctgcggcgcgggcatctgcggcctgcccgcggccatgctggcggccgagaacggcgcgaacgtgcacgtggttgagaagggtagcacgtacggcctgttccgcctgtgcaccgccggcttcaactccgacgtgcagaccaagctggggctgaccaccgaccgtaaagagttcatcacgtcgacctgggccatcaccaacggcgtgcagggcaggatgtcgtcctacggcctgtggttcgacaactcgggcccctacgtcaactggctcgagggcatcttcaacgagaaaggctatcagctcatccctgccgcatcgctcgattacaagatcacgaacgacggcgtggacatgccgggcgcgagcccgctgtggcaggcgttcgcccagatgatcttcttcgcgcaggaggacggtggcttcttcgccacgggggaccccgtcgactggacgggcgtgatggaggcctacgccactgagaagggcgccacgttccactacaacgctcccgccgtgcaacttctacgcgacgatagcgggcggtgcacgggcgtcatcgccaagaacgagtccgacgagtacgtgaggtacaacgcctccaagggcgtgctgctgaccacaggcgacatggccgccgaccgcgagatgatggcgcactacaacgtgtcgctgagcaagatcgtccgctacaacatcaacaccaacgacacgggcgacggccagaagatgggcatgtggatcggcgcggacatggacgagttcgcctgcggcgacctgtggccgttcgcggccgtcatgatggacggcacgctgcccaccacgttcgagggcacgcacttctacgccggcgtcgccaacctgccggtgctcatggtggacggcgcgggccgtcgcctcatggccgagaacctgccgttccagtcgccttccatcccgaagctcacctgcacgcccgacggctgcgcgtggagcatctgggacagcgcctggaaggagaagttccccgagggcggctacatggtggaggattacacggcgtccaacacccaggaagaggtggacaagaacgtggagaacggcatcacgttcaagtttgataccatcgaggagctgtgcgaacactgcggtttcgacaaggacatcttcattgccacgttcacgcgctacaacgagctgtgcgaggccggcgaggatctcgacttctacaaggatccgctgtggatgaaccccatcgacacgccgccgttctacgcatccaagcactgctcgtcgatgacctcgacgcgcggcggtctcaagaacgacgagcgttgccgcgtcctcgacaaggaggggcggcccatccccggcctgtacgctgcgggcaacacggccggctcgttctacggcaacgtgtacccgcccaacgtcatgggctccggcatcggccatggccagtgcttcgcctggttggccgtcaaggatatcctcggtcttgactacatccatgcgaacatctaggaaagccgaggtgcctgacgtgaagaggaagaacctgttgatggcggtgtgcacggtgctggcgacggtcgcgttggcggcgacgttggggggatgcgcgccctcgcagccttcgggcgatgcgggcaacggcggcgccgatgcggcatcgtacccggttggctcgctcaaggccgttcatgtcgccggacagctcgacgatgcggacgagtaccccaacaagctgtgtctgagctgccacgaccgcaccaccatcaatgcggcgaacgaggacttcggcggcatcgagggattcaatcctcacaaggcgcaccttgaggccggcgactgcacctcctgccactcggttgacggcacgtcgaccctctcctgcaacgagtgccacgacgcgccgctgcccgagggctggcagagcgccgagcgcggctccggcccgctccacagcctgacgaagtaacatctcctcgctgagcgggcgccgcttccctccccaggcgcccgatgcgaagaacggcccccgacgaacacgccgggggccgttgctttcgcgcgccgccgggagggggaggcggcgcgcgaggatgggcggtgcggggctacttgccggcgacagcgcgtcccaccacgtagccctgcgtgtggcagcggccgagggagaggccgggcaccgtcatggggtagtcggggctgccgaagaagttgccggcgcagttgccgatggagtacaggccctcgatgggcgccccgtccttgtcgagcacctgcatgtcggcgttcacgttcacgccgtggatgatggtggacaggccgatgcggcggtggatgccgtagaacggcggcgtcacgatgggcttgagccacttcgccgccttgcccatgtcctcgtcgacgcccaacgcgcacagctcgttgtagcgagcgacggtcttcgcgaaggtggcgacgtcggtcaggccgagcttctctcccagctcctcgatcgtgtcggccgcgtaggtgttgatgagcgtgtcgtacacgccttccttctcgccctcgacctcgggcatgtagttcaccatggcctcgggcgggatgagggccccgggccagtcggcgcagtcggtcatgtagttgctgtcgaacacctgggtgtaccagccctggtcttcctcgcttttgaggaagttgcccatcgtggccatctcggagcggttctcgttgcagaagcgcgtgccgtcgttcttcacgcacaggaagggcatgtcggccatcgaccctgggccggcgtcgaagtcgtggagcaccttcgagccgcacacgtcctccatgcgcccgccggcccataccatcatcttctgcccgtcgccggtcttgttctgctccttgcggtagatgttcgccatctccgcttcgtaataggccatcatctcgtcgtcgttctcgtagtcgcccgtggcgatgatcacgcctttggacgcgttgaactggatgtagccgtccttgccctcggcgaccacgcccgtcaccgcgccgccgtcgttctgcacgagctgcgcggcaggggtggagtagaagatatcgacgccctgctgctcggcgtagtcggcgatgtcgcgcatgccgttgcccgtgttgtagggcttggggccgaagtcgaaggcaaagtacgtgatgtcgtacccgtcgatctgcttgatgggccccgtccacttcgcggtggagtccaccacctgcgcgcccgccttctgggcgatatcccacagccactgcagcgcctcgccggagttgtacgcccagaggcgcacctgctcgcgatcggaccggtggcagcaatcctccgtgatgagcgacacgacggcctcgaccccggcggggtcggtctggtccaggatgatggaatcgcaggtgttgccctgcgagatggccgtggcctccttctgcagcagcgccaccttcgcgcccgcctcgaaggcggacagcgctgcgggcacgcctgcggcgccggctcccacgaccacgacgtcgtagtccttcgtctccaagatatcggtgatgggctccggcttcgcgaagaagctgggcagcccgtcctcggccgcggcgcccgcgttggcggatgcggccgtgccggcggcgcttccctgcggcgcgcacgcgctcagcatggatgccccggcggcgccgacggcggcgacgcctccgaatttgaacaggtcgcgacgtgaaatggtgctcatgagttgattccctcctcggtcggtgcggttcgtcccctgcggaacgggccccaccatagggcagcgggcggaatgcgcgcatcgaccgcacggggattcgcaggcttaaaaatcgtaacccccgcgcataaccccctgttttgctcggacgatgcaaaaccacccgtcgcgcggtttctcggttcggggcgtttcgtctataatcgccccgaggcttgacgggacgaaggggagctcctcgacatgtcggtggaacgggaagatcatcaagaagaatctcaggaagcgccggtccggaggcggtcgcggctgttctgcggcgcgatcgcggtgccggtcgcctttttgggtttgggcgtgtatcgcgcgtggatcgagatcatgttcgtggggtcgttcgtcgatttccccgcagtggcgttctcggggcgggacctgttcgacctgaccatggtggtgaccgcggtcgcctgcacgctgctcgcgcgcaggatcgggccgttcttcgacaagccggccgtctacgccctgtgcgccgcgacgctgacggcgtccaccgtgctcatgttcgcgtcgtgctggctgcccggcatcgcgccggcggtgggggtgccggccacgctgctgggagggttcggcatcgccttgctcatcctgttctggagcgagctgtacggctgcctgaaccccttgcgcgtggcgctgtactattcggcgtccatcgtggtgggcgcgcttgtgctgtacgtgtaccgcgggttcatgctgccgtggctgttcgtgatgacgtccctgctgccggcggcgtcgctcgtgctgctgcgccgcgggttcggcagcctcccgacggccgagctgccctcgacgtcgtggacgcggttctcggtgccgtggaaggcggtgctgttcatggcggcctacgcgttcgcgtacgggctcatggagggcgggctgtacgccggcgcgttcggaccgcattccgcgccggggacgctggcggtgggcgtgctcgtgtttttgggcgtggcggtgcgcggcgggcgcttcgacttcggcatcatctaccgggtggcgctgccgctcatggtggtggcgctgttcctgcttcccacgctcgggcacgtgcagggtatggccgccagcttctgcgtctccgccgggtacacggcgcaatccgtcctcatcatgctcatcatggcgaacatctgctaccgctacggcgtgtcggccctgtggctgttcggcatcgagcgcagcgtgcggcaggtgtccatgtggttggggcggctcgtggccgacggcgcgcagtcgttcgacgtgctgggaggcaacggcgagctgttcatctcgctgttgacggtggtggccatcgtgaccgcaaccaccatcctgttctcggagcgcgacctgtccagccgctggggcgcgaacttcctggcgggaggcaccgactcggccgcgatgatacgcaagcaggagctggccgaccgctgcgccgaggtcgcgcgcgcctacaagctgtccacccgcgaggaggaggtgctgttgctgctggcccagcgcaagacggtgggcatcatcgagcgcgagctgttcatcgcgaacgggacggcgaaggcccacgtgcgccacatctaccagaagctcgacatccacacgcgccaggagctgttcgacctgttgggcgtcgaagcgcgcgagggcggcaaaggcgcgggtgcgacggccgacgaggggctgtaaggcgccgagcgtccgcgcatcgtggtagcgccgaggtcggtcgcgtcgcttcgccgctgcgcgtctgcggcgaagcgctcggagaggcggcccgttcgcgtttcggatcactcggcgatcgaggaaccgctgagcgatacggggagccttcgcgagcgctagctttccgccgccgtgacagggggaggggagtctatgcgcttccgtcgtcgaccatgatcggcatgtttcgtgcgggcgcgcttcccgatgtcggcgtgaaagcgaaattccctttttttgcacaataatccgcgacgtgcggtggttggcagggttttgggaggctctcggagcttcggaatgcgcccctggcgagtgacggctgtcgtttccccagttcgcgcgatccctggaagcattgggagggttgtaaggctgcgcacgtcgcggttttttgctcatttgggagagtttttgcgtgcagaagccgcgcagagcctcccgcctccagcctccgaacgcgagaaagcgagcccaggccggggctcgctttctcgcaaagacgggtcgatgcccgaatatgcgccgccgcgaaggaggacgcggcggcgcgccaaggggccggctacatgatgagcatcgccgcggtcagcaccaccacgagcacgatgccggtgaccacgatcaccttcatcacccacttgagcatggtggcgtactgcaccttcgccagcgcgaggcccgccagcacggcgccgttcagcggcgtgatgatggccacgaggccgtgggcggccacgtagatcatgaccatgacctcggccgagaagcccaggccgttcgtcagcggccccatgatgggcatcgccagcgtggccatgccggagctcgaggggatggcgaacgacagcacgaagtagaacaggaacgtggcgggcgcgaagatgaaggcgggcacgccggacagcgcgttcgcggcgttcgtgaggatgaacgtgtcaagttgcgtctcgcccatgatgacggcgacggagcgcgcaagcgcgatgacgagcgcgacgctgaccatctcggcgcagccgccgaggaacgtcttcacgatgtccttgcccgcgaagcgcgcgaagatgccgatgacgatggccatgagcaggaaccacgccgtggcctcgttgaagtaccacatgcccagcggcacgccggtgagcaccgcgctccaggcgcccgccgggtcgtcgaccgagccgccggccatgaagacgtcgatgccgaagttctgccacggtacgaagccgacgatcatgacgacgaacgtgagcgcgaacagcacgagcacgaccttctgcttgccggagaggacggccgagaacgccgggttctccgcatcctcctccatctggccgtactccttctcggactcctcctgctcctgcaacgacaggaacgtggagcctttgtcggccttgaccttcttggcgtagcgcatgacgaagaagatggagatggcctcggcgatgacgaacagcacgagcccgaagccgatgatgacgccctggtcgatggcgatgcccatgtcggtgagggcggcggtggccacgccgacggagaacgggttcaccgtggagccgatgcagcccgcgcccgcgcccagcagcaccacgagcgcgccggtgagcgtgtcgaagcccgcggcgtacatggtggcggccagcaggatgtagaacggcaccgtctcctccatcatgccgtaggtggagccgcagatgccgaacagcagcatgaggatggggatgaggacgagctcgcggcccttgagggcgcgtacgagcgtggcgacgccggtgtcgagcgcgccggtcttgttcaccatggccagaaagccgcccagcacgagcacgaacacgcacacctgcatggcgctcgagaagccgagcaccggggaggtcagaacgtcggcgaacgacgctccggttacctcgctcgtgaagaacgacatcgccacggtgacgagcgccacgacgatcaggcacgccacgaggatgatgaaggagtccggtgcgcctttcttcttgcgcttcttcttgccgccgggctcgggggccgcggcgacgggcgcgccctcggcggcttccgtcgccagcttctggttctcgctctcgctcatcgctcgttctccttgtcgtcgcgcgctcgggcttccagccagcgcagggccatcgttgcggtcatcgccgcgccttcgacgaacacgctctcgtcgaacaccacgcgggagttgtgcacggggtagcgcacgccttcgtcctccgagccggtgcccatgacgaagtaggtggtgggcacggcctgcgagatgacgctcatgtcgtcggagcccgagatgggcttgtcgaggatggtgacggggcggccggtgaggtcctccacgtagccgatcagctcgtcggtgagatcggggtcgttgtacacgctcggcacgccgcggaggaaccgcacgtcgacgctgccgccgaagccctccgcgatgccgcggcacatcgcctccatgcgctccttgagatgcgcgcgggtgccctcgtcgatggtgcgcagggtgcccagcaggtgcacgtcgtcgggaacgatgttggcggccgtgccgccgttgatggcaccgaacgtgatgaccgcctggtcgttcgggtcgagctcgcgcgcgatgaggttctgcgcgccgaagaagatatggcaggcgatgttgaacgggtccaccagctggtgcgggcgcgagccgtggccgcccttgccgtgcacgacgatgtcgatgtcgtcgatggacgagaagccggtgcccgggcgcgtggcgatctcgcccaagcggtagtcgaacggcatgaggtggatggccgtggcggcgtcgacgtgcgggttctccagcacgcccgcgttgatcatggcctcgttgccgcagatctcgtcgggcgcgcagccctcctcgtcgggctggaacatgagcttcacgcagccgggcagctcggcctcgcggcctttcaggatgcgggcggcgcccagcagcatggcggtgtgcgtgtcgtgcccgcaggcgtgcatgtagtcggtcggggaggcgaagggcagccccgtctcctccttgatgggcagcgcgtccatgtcggcgcgcagcatgaaacagcggcccgccgacgggtcgccgatggtggccacgaggccgcccggcacgatctcttccggttcgagaccgatttcccgcagacgctcggccacgtaggccgtcgtttgagggaggtcgaacccgatttcgggatgctcgtgcagccagcggcggtcggcgatgatgtcgccttccagcgctttggcttcttccaggacactcgtcatacgatgatgcctccttcgctcgaggcgggcggggctcccttgcgttggggaatcccgtccgttgcctgcaccccgcgtgcggggcgccttctgcggggtacaatacggaggcgaggcgggggtgatcgtcaccccgctggcgttacgcgaggacaaacggtaggttttcgacggtaaacggtagagaaacgggggcgaaatgcggaatgcggaacggaccgccagcgggcggaacgccggcggcgagccttctcgccccgccgtcgcgcgcgatcggctgatcgacgcgcgcagcctcgtggccgtgtgtgccctgtcgctgtccacgttcgtgcagaacggctacgtgtaccctcccttcaacgcggtcgtgccgtgggggttcgcgctgtgcgggcttctgtacggcgcggcgttcgggttgtgggcgttcgcggcgcaccgcagcggctcgccgctgccggtgcgggccgtgacggtcggcgcgctggcggcgctcgcggcgggatgcgggctgtggatgctcggcgtgcagaacggctacgcgtcggcgctcggcgttccgggtgcggcgctgctgtcgtgcgggcgcagctgggcggtcatcgtggcggggctgtcgctcacgcgcctgcgcccgcgcggcgtgctcgtcaccatggccggcggcgtgtgcctgtcctacgccgtctaccttgtgctcgacccgctgctggccgcctgcgcgccggtcgtctacgcgctcctgcccgccgtcgccctcgcggccgtggcgggccccgtcgcgcgcctgcgcgacgcgctgccggacggcgcccctcccagcgagctggcgctgacgaacccgggttcgttccccgggccgttcaaccggctgttcgtgtgcatcttcctgttcgaggtggcgttcggcctgtccatcacgttcggtgcgggcccgacggcctggtggcagagcgcaacgtgcggcgtcgcgctgctggcgctggccgcatggtgcgcgcgcacgcagcgcgcgtcgcgcgaggacgcgctgttccacgtgtcggggctgctcgtggtgttcgggttcttcgtctcggccgcgcagaccgccgtgctcgggtcggtggccctcggcgcgctcaccgtgggcgcgcagatgttcagcgtcctcacctgggcgacgctcgccatcatcgcggcgcgcaacccctcgggcggcatcgcggccctcggccagggcttctgcgcctcgaacctcggcgccacgacgggcgtcgtgctggggcatctgcccgtcgccgccgacgccgcgggcgccgacgtgcgcctgctgctgttcgcgctcgtggccgccgccttcgtcgggtacgtatggatcgggctcaaggacttcagcttctcggcagccatccgcggcgtgaagccggtggaggaggtggaggcgcccgccgctcccgaggccgccatcgacacgcgctgcgcgcacctggcgtccgtccacgggctcaccgagcgcgagggggaggtgttcgcgctgctggcgcgcgggcgcaacggcgcgttcatccaggaggagtgccgcgtgacgcgcaacaccgccaagacgcacatccgccacatctaccagaagctgggcgtgcacacgcagcaagagctcatcgacctggtggaaagcggacgcgacttcatcgtctaacgcttgtctgtcgttgccggcgcgcacctgcgcatcgggcggcgcttgtggtaccctaacgccaacgatcaagctgaaggtaaggagcctacgatgcgcgaaggaagcgctcccaatttctgcccgccgaccgaggagggcgtcacccttgtgctcgaggacgagacgggcgagcagacggaactcgagttcctcggcctcatcttgcaccacgaccgcagctacggcttcttcttccccgtaacagaagacgagcccgtgggctcgtccggcgaggtcgtgctgcttgaggtgaccgagctcgacgaagacggccaacctgcggccttcgagttcgtcgaggatgaagcggtggcggccgaggtctacgaggacttccgcaccgccacgaaggacctgtacgacttcgcgtagccgtaccggcttggcgcgcgcgtcagcggccgagcgggtcccagcccgtcgggggcttgacccgctcggattgcgcgatggccgccacgtacatgatatcgtggttgatcgcttgctccaggcggcacacctcttcctcggtctcggcgtattcgaaaatgcgcgctgccgcgcgtctgatcgtgtccatcaattcttcgtactcggttccgctcatgtgcgacctccggcgatcttgccctcaagcaatgaccctctcgataaactcatagtacaaacctcttgttttattgacggtctgtaaactatagtttacgacttttcctcccgccgggactagcctttaaccggcatggagaacacttcactaaaaactcagctcggaaccaatatcgcgaggctccgcgcgagcgcgaacgtgtcgcaaacgtccttcgctctcatggtgggcgtcagccgcaaatacctcatcgatatcgaaagcggaaaagcgaatccgacggtcgacatgctcgagcgcatcgcgggcggcttggacaccaccgtgggccagctgttcgagggtctgtgaggggtcgccgctacagctcgacggggttccagcttccgtcgatgtcgcacagccatgcttcgggatcgcgcacggtgaagaacgtgagcgtcttgtcgtccggcccctcgtagctctcgccgagccccgtcatgtgctcgtaccccgcacgacgaacctcatcgttcgcccgatcttcgagaacagcttccccccgcatgataacccagccgctgcccggtttccaggcggtcaattcaaactttgggttgagctccagctcgcggtacacgtccttcgtggtggcggtgcagaaccagatccggccgtcctgcacggcggcgaagctgaaggggcgcacgtgcggctgatcgccctcgcaggtggccaggtaccaggccgggacgctcgtgaggtagtcgacgatggtgttcgttccgttcatgggggttcctttcggttgggatagggcggcttcggagcggtcctaccaggggatgaagttggtggccacgacgcaggccagcatggcgacgatgacgacgacgccgttgcggtcgagcgcggtgaacgcgaggggatgcaggcgcgtgcggccgacgccgccgtggtagcagcgggcctccatggccgacgacagcgtttccgcgtggcggaacgcgctggtgaacagcggcaccatgagggaggcgagcatgcgcagccgccctttggagaacgtggcgccgcggctgatctgcgcgcggtacacggtttgcagctcgaaggtgaactggggcaggaagcgcagggcgatgcccatcatcatggacagctcgtgcgccggcacgccgatgcggctgaaggggtgcagcaggtactcgaacgcatcggtgatgtcgagcgtggcggtggtcagggtgagcaggctcatccccagcagcaacagcagcaggcggcaggcgatgaaggccgcctgccacaggcccgcctcgctgatgcggatgatccaccactcgaacagcaccgtgccgccctgcacgaagaacacgttgagcagggcggtgaccaccacgatgaacgcgagcggcgcgatggacttgaacgccgagcggatggggatgcccgccagcctgaagaagccgaacacgaacgccgcgcacaccgcgagcccgagaaacgactgcgcgacgaacaccaccgccatgagcgcgagcgccagcagcagcttcgcgcgcgcgtccatgcgatgcagcgggctcgtgcccggccagtagcgtccgatgaccgcgatgtcaggcatgaggggcctccgaggcttcgacggccgcgcggtaggcgcccgccagctcgtccgccagcgctttcacgtcgtacagcttcgacggcagctccacgcccgctacgcgcagctcgtcggccagcttctggggggcgggcacgtccaagccgatggcgcgcagcccctcgccgtgcgcgaacacctcggacggcgtgccgaacgcgaactgccggccctcgttcagcacgagcacgcggtcggacaggcgggcgaggtcgtccatgctgtgcgacaccatgaccacggtgagcccgctgccgtgcagctgggcgatgaggtcgaggaactcctcgcgcgccacgggatcgaggccggccaccggctcgtccagcacgaggacgcgcggctccatggccagcacgcccgcgaacgccacgcggcgctgctggccgcccgacagctcgaaggggctcttgtcgcccagctcggcgatgtcgaggcgcacgctttccagcgcggcggccacgcggcgctccacctcgtcggcggacagccccaggttgcgggggccgaacgccacgtcctcgcgcacggtggcggcgaacagctggtactcgggatactggaacacgagccccaccttgccgcgacaggcctgcgccgcgcgcttgtcggccaggtcctggccgtccagcagcacgcgcccgcgcgtggggctcaccagcccgttcatgtgctggatgagggtgctcttgccgctgccggtgtgaccggcgatgccgaggaactcgccgtcctccagctcgaacgtgatatcgcgcagcgcccacacggcgtcggggtcgcctccccaggccggcttgccgcgctcgagcgagggggcgtcctcgatcacgccggcctcgcggcggcgcttcgcccgcgacttccgcttctcctggcgggcggggtcggcgtacgagtagcttacgccttcgaaagcaatcggcacagctcctccttcaacgtggtcgtctcgatgtgcatgcccacgggcacgccgcgccgccccagctcgagcgacagctcggcggcgaacggcaggtcgaggttgagatgttccagcagctcggcctgcacgagcacgtcctgcggcgtgccgtcgcaggcgacgcggccctcttccaatacgatgacgcggtcggcctgcgcggcttcctccatgaagtgcgtgatcatgacgacggtcatgccgcggtcgtgcagctcgtggcacacgcgcatgaggcccttgcggccgcgcgggtcgagcatggccgtggcctcgtccaggatgaggatcgagggctccatggccagcacgccggcgatggcgacgcgctgcttctgcccgcccgacagcgccgcggtctcgcgtttgtcgaaaccctgcagccccacgtccgccagcgcgtcggccacgcgctggcgcaggtcgtcggtgggcacgcccaggttctcggggccgaaggccacgtcgttctcgatgaggctggccaccagctggtcgtcggggttctggaacaccatgcccgcatggctgcggatgaagtaggtggaccgctcgtcgcgcgtgtcgtggtcgagcacggtgacgctgccttcgtcgggcacgagcagcgcgttgatgtgcttggccagcgtcgacttgcccgagccgttgccgccgaggatgcacacgaactcgcccggggcgatgcgcgcgtccacgccgtccagcacgaagcggtcgccgtcgtacgtgaagcctgttcccttgaactcgatcatgcggttagcgtcccttcacctgcttcttcttgggtgtgatcaaattggagatgctcttgtacacgatgagcgtgagcaccgcgttgatgccggccttgatgaggttgaacggcgtgaggatgggcaggatcatggccacgacggcgtcgagcggcacgcccagccacatcggcgtgatgacgaggttgcccaggatggccatgacggtggccgtgatggcgctcagcacgaggccgacgacgccgctcttgaacgtgcgcgaacggcggtacacgagcgcggcgggcaggatgaagccggccaccacgaggatgttcatgacggcgcccgagaagtcggccatgaggatgccgtggatgacggcgcccacgacgcccaccgcgaggccggccgccgggccgaaggcgaagccgcacaccatggcgggcatggcggaggcgtcgtacttgagccaggtgacgccgggtagcagcgggaactccacgaacgacagcagcacgccgatcgcgcacatgagcgccatcgtcacgagctggcgggtgtcccacttgttggtgttggtgaattcgtacgtgtcctgggcgttggtgcccggtgcgttgccggtcatggcaacccctttctcttgcaggccgtgacgttcgggtcacgtttcccggcctaaagagaaaacgagcccgtatgaattccttccatacaggcttcttggggtccgagccgacgcacgcggggcgtggtcgacgcggatctctgcctcttccatccggactataccgttggttccggaatcgcaccggaatcagcctgcaaccgcactccctatcggggacgttcgcagggtcgcggactcccggctcgccgatgcggggcatcgcggccggattaccgccagtgaggaattgcacctcgccctgaaacagaatccatgcgctgcattgtagcgaccttgttgccgtctggcaaccacgcaatgaccgaatgggggacaatgcgcaggttttgtgggttgggcggcgcctcgttgccgtataatcgcagcaacgaagagggtccggcacgaaggggagggcaccatggccgagagcagaatcgtcaacgaaccgcgcagcaagaacccgctcgtcaaggccatccgcgagctgctggagcatcgcgcgctgtggctgtacctgctcaccgacgaggcggcgaaggcgggcgccgacccggccgcgttcgcgccggcggccgtgaagcgctgcgggttgttccagggcgcggagctggtcgcgaagggcggcggcacgaacagcctgaagagcctcaagaagggcctgttcggcaagcctgcgcagatggtgttcgagatggacgtgaaggacgtgcaggatgaccgcttcgagctggagttccactactgcccgctcgtgaaggcgtggcagaagcagggctgcaccgacgaggagatttccaacctctgcgactgggccatgtgcggcgaccgcggcatcggcgaagcctacggctgcgacctcgacctgcccaagaccatcgcccgcggcgacgacgtctgccatttgatctaccaccgctaaaaaggcggccgcaagaagcctcggcctgcgccggggtaaccgtttgtggacggggggcgttgtttttgctgatcgggcgaactacggggtagaatagcggaattatgttcgaactactcaacaccatcgacgcatttgtatggggccccgcgatgatcgcgctcttgctgggctcgcatctgttcttcaccttcaagacggggttcatccagcgcaagctgccgcaggccatcaagctgtcgctgtcgagcgaccccgagggcaagggcgacatcagccacttcggcgcgctggccacggcgctggccgccaccatcggcaccggctcaatcgtgggcgtggccacggccatcctcgcgggcggcccgggcgcggtgttctggatgtggatcaccggcgtgttcggcatcgccacgaagtacgccgaggtgtacgcggccgtgaagtaccgcgtgcgcgaccacaacggcgccatgctcggcggcgccatgtacatctgggagcgcgcgttcaggcgcaacgccgagggcaagcgcgacccgagccccggcgggcatactccctggtgggcgaagctcggtgccgtggcattcgccgcgttcgccgccatcgcggccatcggcaccggctcggccgtgcaggcgtcggccatgtccggcatcatcacctcgaacgtggacgtccccgcgtgggtcgtcggcgtggtcatcgtggtgctggtgtccgtggtcatcttcggcggcgtgcagtccatctcgaaggtgtgcgagcgcctcgtccccatcatggccgtcgcctacgcgggcggctgcctcgtcatcctcgcgttcaactgggcgctcatcggcgacgcgctggggctcatcctggaatgcgcgttcacctcgaaggccgcgttcggcggcgcggtgggctcgggcatcatgatggcgctgcagttcggctgcgcgcgcggtttgttctcgaacgagtcgggcctggggtcggcccccatcgtggcctcggcggcctccacgcgcaacccggcgcagcagtcgctcgtggcgatgaccggcacgttctggtccaccgtggtcatctgcgcgctcacgggcatcgtgctcgtgtccacgatgctggcgaaccccgacatcgcgtcgtccatcatggcgaaccccaccgtctactccggcgcgatgctggccagcgaggcgttcgcgaagatcccctacatcggcacgcccatcctcgtgctgggcatggtggcgttcagctacaccaccatcctgggctggtcgtactacggcaaccgttgcatcacgtacctgttcgggcgttacgccatccgtccgtaccaggtgatctacgtggccgtggccttcctcggcgccatcggcgtgggcgacatcgtgtggacgatctcggacatcggcaacgcgctcatggccatccccaacatcatcgtcgtgctgctgctgagcggcatgatcgcgcgcgagacgcgccactacgtgtacgacggcaacctcgacgaggccgacgacacgcccatcccgcagctggaggggaagtagcgctgcgacgccgggcgctgcgcccgcccgccttgcgcggggagggcggttgccgcgggagtcggcatcggcccggcacgggaatcgcggaattctaggcaattttgacgttttgcgcacgatcgagggctgcggtgtccgaggcggcaaaactgacctggggcgatgctcgcccctgttccgcggcggggagccgaagggccgaaatcgtacgcaaaacgaaaaaattgcttacttcgggcgaatttccggccgcgtcccgaatcgtggtgtatcagggccatcgccggagaatcgccggcacccttgcgaggtgaatcttagccttcgtcctccttcgggtcaatggcgctccctatgatcttgcgcgccgcctcgcgggcggcgagcacctcggcctcgccgggggcctcgcgctcctgggccttccaggcgtgcgcgagcgagggcctggagatgacgcagcgcgccgaccactcctcgtcggcctcgatgagcgccgctcccaccaggcggatgagcgactcgcgcgaggggaacccctgcacgacgcgcgtcctgcgcttgatctcgcggttggccctctcctggacgttgttggtgcggatcttggtgcggtgcgtggccgggaacgccaggtaggcgagcgccgcctcctcggcctccaagagcacgtttccggccgccctcgagatcttcagcacctcctcggtcgcctcttggtagcacgcccgcacgaggacggggctcttctgcgcgaagacggccttcatggcctcgcgcgcctttctctggtcgtccttcctgtggatgcggcccgccacgttgcgcatgaggtgcgtgacgcagcgctgccaggccgctccttggaacgtctcggctatcgccttcgcgagcccttcgtgggcgtccgagacgacgaggcgcacgccgtcgacgccgcgcgccctcaggccggagaggaacgccttccacccggcgtggctctccgtgtccacgcagtccacgccgacgaagcgcttgtggcccgtgtcgtcgagcccgatcgcggtcacgacggcctgggacgccgagcgcccctccacgcggcacttcacgtaggtggcgtcgagccacaggtaggcgaagcgcaccccgtcgaagcgctgcctcctgaacgcgtccacctcggcgtccaggcactcgcacaggcgcgacacctgcgacttcgacatcgacctcacgccgagctcgcccgcgacggcctccaccttgcgcgtcgatatccccatgacgtacatctcggccaccgccgcgacgagcgcccggtccaccctgcagtagcgctcgatcaggtcctcggggaagaacgagcctcggcgcagcttcggaatcttgagggtgacgtcgcccgcggcggtcgagagcccccgctcccggtagccgttgcgcgagttgacgcgcccctcgtcgcgctccccgtagggggcgttgcacgcctcgtcggccttcgccgacatcgcggcgttcgccaggagctcgagcatcctgcgcccgaaggcctgcaggtcggtgcattcctcgaggatcgcgaacgcgagccccttcacttcggggtcgttgaatagtagagtgtccatagcgggcatcgccttccttcgaatctgtcttttgtggtgattgacgattctagacgatgtccgtttttctcgggcaggcttcgcccgccctccagaaacggattgatacaccaactttcgggacgctaccgaatttccgtgcccgacggcgtgcccggctccaagcgagctcgaagccgggcgctcgaagctctacggcgtcgcgggccgcgcccgcttcgcgcgcaggtgcgtcgccgcgcgcagcgcaacgtagaccagcatgatcgccgtgtacgcggcgatgctgaacgcggctttctgcccgctcgacgagacggtgggcgccagcaccagcacgaggtgcgcgtacgtcagcccgaagaacgcgtaggcggttttctgcaggcgcttccacgcgtcggagctcatgcgggttttcaccgcgttgaacgacgtgacggtgagcgccgccagcagcacgatgagcaggctcgacacgacgaacgacgcgaccatgcccgccgacatcccggcgaaccccgacaggatgtcggccaggtacgtgcccaggtagttcgccacgtgcccgacggtcaggatggcggcgatgatggacagctcgccgcggatgggcatgagcatctggcgcgccttcgacccttcgggcagcgccccgatgtacatgacgagcgcgaacagggcgaacccgagcaggcaccgcgtgaggtacgggtacaccgcggcggcgaactcgcgcgagaccccgaacagcacccctgacaggaacagcacgtcgacggccacggccacgatgtagaacgacacggcgtagcgcttgatctgcctgtgcagcgcgcacgcgaacagcacgcttatgagaatcgccagcaacacctccatgggaacctcctttccagcctcccggccgttagcggaccacccagccggcaggcacgtcggcgtcgctgtggcattgcgcgcactgcatgaccgacgcggtgtgcgacttgtggcacgtgccgcacgccagctcctcgtggaaattgctatgcgggttgtactcccgctgcgcggtgatccgcgccaggctgtcctgcccgatgtcgtggcacgatccgttcatgcagaacgcgttgtcgaactgccgctgctcgagcggcagcgcgtagccgcccgccacccacgtcacgccctcggccagctgctcgctgagcgtgggcacgtggcagtcgaggcagctgacgtccgccacgcgatgcgaggcggccagcagcgtggcatcgtcggcgtagtagtcctcgacgtacgggtccatgggcgtgtggcagatggcgttgcagaagctgggctgctcgtgccatacccagaaccccgcgccggccgccacgacgaccgccgccgccaccccgagcgcgatgagcctcttggttctcttccgatcgttcatgattccctccttgacgccccgcccgcgcggcatgcgcggcgcgggcggggccgctgatccgttggctggctactggctgacgaggcgtcccttgccggtggcctcgacctcgcacaggccgcacctgaacggcgggaacccggtgatgggatcgaaatcgcgcgtggtcagcagattcacgttcgcctggtgccatccgtggaagatgtcgaccatgccggcgtgcacgaggttcgtcacctcggccttcatctcgatctcgttctggtggttgaacacgcgcaccacgtcgccggtgccgatggagcggtcgcgcgcgtcctgggggtgcaggcgcacgacgggctcgggcatgaactggttgagccaggggatctcgcgcagcttggagtgcgtgtagtagggcaggcgcgaccccgcgttcagcacgagcgggtagcgcttgtcctcctcggtgggcgcgtagggggtgtgcaccggctcctcgtacacgggaagcccctcgtagccgaagcccttgaggatctcggagtcgaactccagcttgccggacggcgtgttgaagccgggctgcccgtccttgcgcagcttgcccgcagcgtgcttgccctcctcgttcggcgatccggggatctccaggccctcggggttcgcgcgcaggtcgtcgagcgtgacgtcgaggcccgccgtctgcaggatgttgtcgagggccgcttccacgtcgccgccgaagcactgctcctcgaagcccagcttgcatcccaggtcgagcatgatcttccaatcctcgcgcgcctgcccggccggctggacgcacggctcgcggaagaacagcttgcggccgtaggcggcgaagggggccatgcgctcgtggcacatggcggcgggcagcaggatgtccacgtagtcgtgggtccaggggcgctcgtagtagtccacggcggccacgaactccagcttgccgagggcttcctggtagcggtccgattcgggccagatcatcacgttgctggccacgaggatggcggccttgatcttcccctcgtcgatgtactcgggcagccgcgccgtctggaagtgcttggtgaacgacacccaggcggggaaatcgtccttgtccacgcgcttgtcggcgaagttctgctcggtgtagacgtcctcggcgcggaacttggcagtggaggcgctcacgtcgagcggcaggccgcccgaggcgaacatgacgccgcccttcttctcgatcatgcccatgagggcggggatcatgaacacggcgcgcagcgcgtggcccacgttggaggagtgggcgagccccgccgagctggtgaccagcgcgctgggcgcgttgtcggccagcaggcgcacggcctcttccagcttggccgcgggcacccaggtgatctcctcgaccttctcgggcgggtactgggcggccaggtcggcgagcccttcgtagccgtgcgtccactcgtcgacgaactgcttgtccacaaggttgtcgcggacgaggatgttgatgaacccgagggccagcgcgccgtcggagccgggccgcagctgcaggtggacgtcggcgagccccatgacggtgggcgtgatgcgcggatcgacgatgacgaacttgcagccgcgctccttctggtccatgagcttcgcgtggcggttcggctgcgaccaggccgcgttgaggctccagatcatgcagctgcccgtgtcgtcgctggggtcggagcccgacgagctctgcccgcggccgtacacgagctgggaggtgatgttcgtggccgtcgagcacagcgagctttcgaggccgtacgtggagctgccgaacagcgtggccacgcgctggatgggcgggcgcggctccttcgggtcgccgcagtagaacatcacggcgtcggggccgtcctcctccttgacgcggttgaactcgctgacgatggcgtcgtaggcttcgtcccaggtgatgggctcccactgcgactgccccgtgcccttggggttcgtgcggcgcagcggcgtttgcaggcgcttgggatcgtagagctcctggatgctggcgaggcccttcgcgcacagcggcgtggtgggatggggcgtgcgcgactcgacgcgcacgatcttgccgtcctgcacgtaggcggtcatgccgcacttgggcacctggttgcacatgtcgcagtacgtgtagcgcttctcgacgggggcgtcggggtccaccgtgccctcggcgtgcgcgatgtcgaagccgaacgcgccggccagcgcgcccccggcggccagggcggacgcgcccttcacgaacgagcggcggctgatgttgccctgcatcgtggtgtcgttaatcgtggtcatgggtgcaccttccttcctactcgctcttcgcttcgtcggccttggcctgggccttcgccttcttcaccccgacgcccacgccgacgccgaccgcggccaccgcggcgacgcctatcgttgccgcaacggggtcgatgccgggagccgccttcgagctttcggcataggcgccgcccgcggcggtgggcagcaggctctcgtccatgccgttcatgggcacgtagtagaacgacgtctcgtccacgcgcacggcgtcgccctgggcgatgcgcttgctgacgtcgctctcggggtcgtcgagatcgccgaagaagcgcgcgtgcgccgggcagttgagcacgcaggcgacgggcagcccctcctccgcgcgctcacggcagaagatgcacttctcgaccacgcgcgagcgctggacgccgtaggcctcgtagggcgcctgggcgtactcgccgaagtagttgcccttgccctcgttgagcacgcgcgcgccgtacgggcacgccgacatgcagtagccgcaggtgatgcacgcgtcgtaatccacgatcaccacgccgtcgtcgagcttctggctggcgccggtggggcagaccgacacgcattcggggttctcgcagtgcatgcaggcgtgcggcaggtacgcgcgccccgcctcgccggcggcctcgccccattccaccgtgtcgagcttcacccaggatacgcccgggccctggttgttctgcagctggcatgccacgacgcatgccccgcatcccgcgcagcgcttgaggtcgatgagcattccccatgtcgtcatacgtgactcctctcctcgatgtccccgtgccctgcgcccgtcgcggcgcagggccgttggggatactctggcaaagtgctggggaaaggggtatcggaagcggtggatgagtcttcgaaaccgcatcggttccgttatatgatctttcgtttgcccaggtgacggcacgctgttcgggtgcatgcccatggggtagaatggaacgcgggagatcgtaggggatacgagggggcttccatggggaatcgcactgctctgaaagacgcgtggtcgagcgcggtcacgcgcgccaacgtgacgctcgccgtggggttcggctgcgcggtgtcgtggtcgcccacgctgctcacggcggcgacgccggacaacgtgatgaacgcgctcgtgaacaagccgccgcacggcgcctgcatgccgtcgctcgtggcggccgtgctggcgtgcctcgtgctgttcctgggcggccggcgcctgttcgcggtgctcgagcgcacggtgaagccgcttgcgctcggcgtggccatggcgctcatgggcgcggtgttcgtgctgccgctcgtcacgcggaactccgtcacggtgacgggcgacgtggtcatcgcggtggcgggcgcgctgtcggtggtgctctacctgttctggatgcagctgttcggcaggctctcggtgcagagcatgttcctcacgctgttcctttcgcaagtgctgacctgcgccatcaacgccatcatctcgatcgcgaacatctacacggtcatcgcgacctccatcgcgctgccgctcgtgtcgacggtctgcctgcgggccgggcagcgcgagcgtgcggacgggcggccgccgagcgcggcccccgccccgcgggagggccgcggcgcgtcggtgcggatgctcgtgaagctggcggccatcgtgttcgcgtggggcgtgatcgaccacctgttccgcagcgagttcgacgcgttcatgcgcacgcaggtgacgagctcgccgttcgcggtggcctaccacgccgcggcgttcgtcgtcgtggtggcggccgtcgcgttcgcctacgcgctgctggcgtaccgcgaacgcttccaattcgggcatctgtaccgcatgatattcctcttggggctggccagcatcctcttgctgcccatcgtgctggcggggcaggcggctatcgccggctacacgtgcagcgtcatcatgtaccagctcgtgttcctgctcatctgggtgatcgccgcgtcggcgttccgcgatcgctcggcgtacgcccccggtttcttcgggctcgtgtacggcttctggtcgctcgggtcgttcggcggcgcgctgttcagctcggtgttcgtgcagcacctcaccatggacaacgtgcatctcatcgtgttcgcggccgtgctcgcggtggcggtgggctacgcggtcgtgttcaccgaggccgacgcgaacgcgctcgtgcagatcgtgccgttcaagcacaagacgcccttcaaggcgaagtgcctctcggtggcgcagacgtaccagctttcgccgcgcgagacggagatcgccctgctcatcgcgcaggggcgcgattcggcgcacatcgagaagaagctgttcctgtcgcgcagcaccgtgcagacgcaccgcatgcacctctaccagaagctcgacatccacaaccgccaggagctcctcgacatcatcgaggccgccgaggccgtcggcgcgtcgtcggcgcgttaggcgaactcggcgccgacgtcgcggcacggaaatttccggatcttaaccaattttgacgttttgcgcgccgtcgaggggcttcggcgcccttctgcgcgcctcccggttcggtggcctttcgaggcgtttcgcataaccgcaggtcgggaagccgctgcgctgacgacccttttcgatttccccgccgcccagccccttcgggtacgcaaaacgcaaaaattggttacttcgagcgaattcccgcgccgaacgacgcccgcgctcgcgaccggctgccgcttcccgcgccgctccctagccctcgcggccttcgggctcgaagcggtagccgatgccccagacggtctggatgacgcgcgggtcggacgggtcgtcctccaccttctcgcgcagcttcttgatgaacacggtgatgctcgacgtctcgccgacgaactccttgccccaggccgcctccacgagctgctccttcgacagcacgaggccggggctcgaggccagcgcgaagaatatcttgaactccttgggcgtgagcgacaggcgctcgccgtccttcgtgacgcggaactgcccgcggtcgagcacgaagcgccccgcgtgcaggatgtcgccgcgcggcgcgacgggcgcggccgccatgctcgcgcggcgcaggtgggcctcgatgtgcatgagcagctcgcgcggatcgaacggcttcaccatgtagtcgtcgccgccggcctggaagcccacgcccttgtccacgatgtcgcccttcgcggagaggaagatgacggggcaggtgatgccgcgctcgcgcatgaggcggcaggtggtgaagccgtccatccggggcatcatcacgtccatgatgacgaggtcgggcgcctcccgctcggcgacgacgaggccctccgcgccgtcttcggcgtaggcgaacgcgtagcccgcgtcgcccgccatgctgcccacgaggcgcgcgatgctgttctcgtcatcgatcagcaggatcttcttcatcgtattcctccgtatccacggcaacgtaggggatgcgcacggtgaacgtgctgccgagcttgcgggccgacgccaccgacacgctgcccccgtgcagctcggccagctccttcaccacggccaggccgaggcctgtgccgcggtagcggcggttgggcgactggccggcctggcggtagcgctcgaagatgccctcctggtcggcttcgtcgatgcccatgccgtcgtcggcgacggacacgacgatgcaggcgccgtcgaacgtcgcgcgcacgtccacgcgaccgccgacgtgggtgtacttgatggcgttgtccacgaggttctcgacgatgcgccgcagcttctcccagtcggccatcgacacgggcacgtcggcgtcggtcttcgcggtcagggcgatgcccttgttcttcgccacgggctcgagcgacttcctgatgaaccccagcaggtccacgaagtcgaccggctccaccaccagctcgttcttgtgcgcctcggccttcgagatggtcaggatgttgttcaccatgttgagcagcagcgtggcgttcgcctcgatctcctccacggcgctgcgcgtcttggcgtcgagcgagtcgaccccgcgcaggatgcgcgcgaacgcgaggatggacgtgagcggcgtgcgcagctcgtggctcatgatggcgaagaactcgtttttgtaggcggtttcctcgctgaggcggtcgagcgccttcttgagctcgaccttctggtacagcagcaggtcgttgagcgccgagagcttgtcggtttggctgcgcacctcgctttcgaggtcggtgtagagccgttccagctggcgggccatcttgtcgaagtcgtcggcgaactcggtgagctcgtcggggccgcccacggtgcgcgcctccagctggtaggagaagtcgcccgcgccgatctgcttcgcggcgcgcccgagcgcgtcgagcgggtgcagcacgagcttgctcacggcgaagtagatgcccacgcaggccagcacgagcacgagcagcaccatgaacacctgctgcagtacgctcgtgcgcatgccgtcggcgtagatgtccatgggctcggtgatggacacggcgccgccgatgtcgcccacctgcatgccctccttctcgtagccgaactggtcgagctcgccgacgggctcgccgtggcattcgaggcacgtctcggtcacgtacagcggctcggcgtagcggaacacgcgccgcccctcggcgtcgtagcccacgtcgtagtacgcctcgagggccgcatcggcgccgaaggcctcgaacgcccgctgctcgaactcgtcgggcgcgttcgccgcctggcgcggggtggggctcgtgtactggatcttgtagtcggtgttcatggtgaacagcgtgctcaccgacttggcggtgaccacgcacacgagggccttcgtgcggaaggcgccgtcctcggtgcggttgatggtgttctggttgatgtcgatgaagtcccacatcgcgtgcatctcgtcggccagcacctcggccttctcgcgcgcctcgttctcggcctgctgctgttgcagctggacgttccacagcgcgtcgacggccatgagggccacgatgaaggcgccgatgaacaccgcgaacttgaagcggatacctcgtttgaacgacatggcgattccccctgaggcgcgcatcgacggcgggcccccttgcccgtcgcccggtacgcgcgaccgtgctaccctcgtaattatccgacaaacgcgggcgcgcgcggcggaaagtcgcggatgataatacttttttaatatctggtaggactttcttaacggaaagttcttccgcaggatattgaaccgatgcgcccacctggggaaaatggggtacgcggaggaacgggggatccaagttccgccgctgtttgggaatcaggacgaggagaggagcgcgagatgaggaaatccgcggatcaggcattgccgtcgctgtcgcgacggacgttcgtcgcggccgccgccacgacgggcgccgccgcagcgttggggctttccggatgcagcccgaaggccgacacggaggccggcgccggcgccgatgccgagggtgcggcgccggacccctacgccgacgcgcaggtgttctattccacctgcccgcccgagtgccagcaccacaacctgaaaggctacgtggtggacggcaagctggtgaaggtggagtcgtccgagctgaacgactgcgcggcctgcgcgcgcggcatcagccgctcgcagatggtgaacgaccccgaccgcctgaccatgccgcttctgctggacggcgagaagggcagcggccagttcaaggagatcagctgggacgaggcgttcgacctcatcgagcagaagttcaaggacgccatcgcgaccgacggcaacaagtccatctgctacgtcaccggctccggcaacttcggcgccatgcacggcccggtggccaacgcgttcttcgggcacctgggcggcgcgtcgaccacggtgggctcgctgtgctgcgcgggcaccacggcggccatcgtgcccatctacggcaagcgcttcctcgactgccgcaaccagatcgagaacagcacctacgtcgtggtgtggggcaacaaccccgccatctcgaagcagggctacttccagcgcttcgagcacgtggtggagaacggcggcaagctcgtggtgatcgaccccatctacacggagtcggccgccaaggccaccgactggctgcagccctggcccggcaccgacgcggcgctcggcctggccatgctcaaggtcatcgtggacgagcggctctacgacgaggagttcctgctcgcgcacacgtgcgcgccgtgcctcgtggaccgcgcgacgggcgagcccgtgctgaagaacgccgacgaccccgcgtcgttcgtcgtgttcgacaagaagagcggcgaggtggtgccgcacgaccagagcggcatcgaggcggccctcacgctggacggcaccgacgcggccgacgcctaccaaaccgagttcgagctgatcgtggccgaggcgtccgcgtgggatctcgcggcggccgaggaggagtgcggcgttcccgcggcggacatcgagcgcatcgcgaaggagtacgcgggcgccgagcacgcgatgatcgtgcagaacatgggcggcttcatgcgcaccgagaacggcacgtacgccacggccgtgggtgcgtacctggcggcgttctgcggccaggtggggcacgtcggcgacggcgtgagcgacgcgggcggcatgaacgaggtggccacgggcaacccgctcgaggtgccgaaggccaccgaggaggtggcagccatcccgcgcttcacgttcggcgaggccgtcctgaacgaggatcccgtgaaggtgaacgtgctgtggtcgatgacgggcaaccccatgacgcagtggcccaacacgggcatggtgaagaaggcgctcgagaagatcccgttcgtggtgacggtggaccagtacctcacgtccacggcgctgtactcaaacctcgtgctgccgtgcaccggcatcttcgagaccgagggcgtgctggccaacgcgcgcagccactggatccagctcatggagaaggcggtcgacggcccgggcgagtcgaagagcgacctcgagatcttcgccgagctggcccgccgcttcggcttcggcgacgcgttcgacgtgcccatgaaggacctcatctccaacgtgctggagcccacgggcatcacctacgacgagctcgtggagaagaaggccgtcgacgtggtgggcaaggactacatcccctacaaggacggcgtgttcttcaccgcgtcgaagaaagccgagttctgggtgggcgcctggaagaaggagggcttcaaccccatctgcagctacgcccgctccgaggaagacgcgcgcaacggcgatgagctggcggcgaagtacccgctattcagcgtgcagcgcaagacgtaccgcagcgtgcactccacgttcaacaacctggagtggatggacgaggtgtgcgatcggaagccggtcgtcctgctgaacgaggcggacgccgaggcgcgcggcatcgccgacggggacgcggtggtcgtgttcaacgaccgcggcgagcatcgcggcgtggccgaggtgaacgaccgcatcaaggccggcgtggtgggcttgcagaacggctggtgggagcagcagggcggctcgtcgagctacgtcaccaacgacaagtggaagacgctcggcggcacccactgctgcaaccagaccctcgtcgacgtgaagaaggaggcgtaagccatggcgctcggattctggatgaacaacaagaactgctacggatgcaagacatgctccatcgcctgcaagagcgagaagcagcttgaccagggcgtgctgctgcgccatgtcacggagatcaagcaggacgacccgcgggcgctgtcgtttttgtccctgtcgtgcaaccactgcgacgagcccgcgtgcgtggcgaactgccccgtgcaggcctacacgaagctggagaacggcatcgtgcagcagaaccacgacctgtgcatcggctgcaagacgtgcatcgaggcgtgcccgtaccatgcgccgtgctacgacgagcaggagagcaagacgtacaagtgcgacatgtgcacggaccggcaggagcgcggcgagctgcccgcctgcgtggcggcgtgccccggcatgaacctcgcggtgggcgagatggccgacctcgagaaagcgcaccaggccgacatcgtgtcggacgacgcggtggagacgaagccgaacttcgtgatcaccgtcgatccggcgctttccgccgagcccgacgacaccgccgtggaggcgcgcgccgccgagctggccgcgtccaagaccgcgaagaaggcgtaaacccctccggctccgcgcgccctctccctcccggcgcgcagggtttctgcgaacggccccgcactggcggggccgttttgcctgttcggcggcatcctccggatcgtacgatgccccctgaacccaagatggttcgcttcgacgatggcgcgcgccgcctccgtttccctaccatgctcttcgcgcgggggagccggccggacgttcggccgccgcgcggacgagaacaggagaggaaggagaccgatgcacgcacaacgcaagatcgcgctggtcgccgtgtgcgccttgttggggacggtcggcatcgccggctgcgctccccaaacgaacgaggcgcttgcgacgggcgaccagcaaaccccgcaagcggaggggcacgagtacaccgacgagcagcagtcgatcatcgacggcgaggagggcacggtatacgacggcatctcgctcgacgcctacccgggcaaggactacctcgacggcatgcacgacatgtgggacgccaacgtggaccagtgggcgcccgagctgcgcacgctgccgagcggccagatcgtgcagcgcaccccgagcgagctcgccgagcgcgcccgccagggcaagacgccgtacaacatctaccggctgaacaacgacaaccgcggctgcaacagctgccacgccgacctcgacgcgacgctgcagcacctcgcgcagaccatgcacccctcgccgaacagcccggcgctcgacgccgagatgacggtggaccagtgcctgttctgccacacgtactcgccgggctacatccccacgcagtacgagttcggcacgctcatccacaacatccattacggcttggaggccgacggtcagttcgaggacgagtacaagggaaattgctactcctgccacgacgccaccaacgatggcgagggcatggcgctgtgggaccagaccaagttcgagcgcctgcgcggcgtgacgaaggtcgagaacgtcgagggcgacttctccatcgaccaggaagccacgatggcgcaggaggacatgttcaacatggacgcctggaaccgcctgtacgaccgcatgcgctccggcgccgagtacgccgacacgcccatgccccagagcctgttcgacagctggcccatcacggtggacggcgaggtgaacagcccctacaccgcgcttctgcccgatctcgtgaaagaggccgaggcggccggcgtcaccgtgacgaaggtgtcgaaggaagtgtgcaactggaacggcaccggcgccggatcggtgagcaacgtggagatcaccggcatacccgtgagctggctcatcgagcgcgcgggcggttacgccgacaacgccgacatcaacggcgtgcgcgtcatgcgcgccgacggctcgtccaagcgcgccatgccgctcgacaaggtagacggcggcgaggcgttcctcgtgtacaagatcaacggcgagcagctgaccgcggccaacggcttcccgtgcacgaactggtgcgagggcgtcgaccccgaggtgaactccaagcagatgaacgagtacaaggtggtcaccgacgcccccgacttcgacgatcacgtgtacgagttcgagcatcacgacggcaacccgaacggttggatcgacgccgacgggaactggacgaacaagcccaacgccaccgtgctgggcgtgcccgagggcctcgtcatccagaacggccagccctacacgttccacggctacgtggacgcctacgacgagaagatcgcgagcgtcgagttctcgatggacttcggcaaaacgtggacgaagcacgacctgggcgacaccgacgtcaacaagctcgtctggttcgacttcacctggacgcctcaggaggagagcgcctactgcctgcagctgcgcgccaccacggaaagcggcctcgtgagcccgcagatccaaacggtcatggtgaacgcgaaggacgcgatgcccgccgccgacgagacggtcgtcatcgacaccccgtcgctcgtcgccccgaagacggcggctgccgaagtggccgaaggaaaggagtaggagcgctcatgaacaagccagctcagaagatcatggccggcgtggcgggcgcggtgctgctcgcatccggcgccggcgcggcccttgccgcccagcagcccgcggctgcggacgggggctcccggcccgtcggcgccacccacacggtggccgaccacgacatccgcgcccagtggctgggcgaggaatccgactacgtgcgcgtcgcggacgtgcaggggtcgttcacgttcaatcaggagggcgtcacgcccaacgacgagctgttcaacgtgttcggaaccgccatcctgtcgatgtgctccaagcccgcgcccgagcttgccgccgggcaggacggcgtggccacctacttcgtgaacgtgggcgggcacgtgaaggagagcttcacggtggacctgtccgagctcgacgacgaggagcaggaggcgctcatgggctgctcgtgcgccacggggtcgcccttcggccaggcggccgtcatcggcgtgccgctggcgtcggtggtgggcatggccgacctcgaggacggcgtgaacaccgtgacggcctacggcgcggacggctacggcgagccgctgccgctgcagtacgcgctcgacaagaacgcgctgctcgtgtaccaggtgaacggcgaggagctgaaggcgtcggagggctcgagcctgcagctgtggatgcccgagacggtggcgcgctacttcacgcgcaacatcgccagcatcgagctcacgcgcgaggacgcggtgcccgaggtggcctcggtcgatcccatgtaccgcaacaagatcgagatcaagaactccgccgacggctgcgcgttcgaggcgggcgacgagatcacgttcgagggcgtggccgacgactgcggaagccccatcgccgccatcgagttctccttcgacggcgggcgcacctggacggcgtgcgacaccgacggcgccacggccgacaagtgggtgaactggcagttcaccgcctcgttcgaggagaagggcgactacgagatgaccgtgcgcgcccgcacggccgacgacgtggtgtcgccgctgtccgccagccttgccttcgcggtgcggtagcccgacgatatgcagcaccctcccgtggacggagccggcatcttgcggctccgtccaacgcgtgctcccgccgatgcgctatactgcgtgcagaaacgcaggggggacgcgaagggggagcgctgcggcatggagcatcggcggggtatcgtgaacgcatgcggggcggcgtcggcggcggggctgtcgctcattcttttgtggtgcacgctcatggggcacacgcccggcttcctgctgtcctcgctcggcttggccgagtgggtgaacgcccgcacgttctggctgacgggcatcctcgtcgtcgccgcggtgctgacggcggccccgcgttgggtggccgcgcacgagggcagcctcgccttcgtcatgccggtgatggccgcggtgggcacgggctgcttcgcgctgtcgttccaccaggacttcttcagccccaccatcctggccacgtgcgggctcgtgctggcggggctcggctacttctggttcgcgtcgcgcttcgtcatcctgctggccacgacgcaggggttcgcgtgcgtggtgtggtgcatcgtggccgcgttcccgttgcgccagctcatgagcttggcgctggacggcttcatcgatcctgcccagcaggtggtcgtggccatcgcgctgccgtgcttggcggcggcgtgcttcgaggcggcccgcgcggcgggcgcgcggcagggcgcggcccgcgcggcgggcgcggagcccgcgacggggccgtccccggctcccggcgcggccggcggtgccgagccgagcgcgcggcagcgccaggcggcgggcgacatggtggcggtgctcgtcatcgtgggcgtgctgctggcgatggtgcgcatcttcggcccctcgggcgtgtggggcgactcgaacaccacctacttcgacgcgctcgggcgcatccccgccatctcggtgcttaccgtgtgcctggcggcgttcgcgtggctcgccctgctgctcatggcgaagcagcccgcgtcggtgcgcttccagccgcccatcctcgtggtcatcgcgggcctgttcgtcgtggtggtgcgcgcccagctgggcgacgtgccgtcggtgctgctcgacagcatcgtgcagctgaacgacccgttcgcccacctgctgttctggtcggccgtcgcggccgcgtgcacgctgctgccgctgcccgagaaccgcatcgtcggcatcgcggggctcgcgtacgccgcggcctcggtggtgtgggtggtgttcctgcgcggcagcgccgtggtggagacggtcgtcatcctcgtggtggtggcgctcgtgatgaaccgctcgtggctggcctcgctcgtgcgcggccgcggacgggacggggccgccgccgacgacgcggctgccgacggggccgccgacgacgcggccagccgcctgacccggtccatcgtcgcgcgctgccaggaggttgccgccgcctacgcgctgtcgccgcgcgagaccgaggtgttcatgctgctggcccaggggcgcacctgctcgttcgtgcaggaggagctcgtgctggccgagagcacggtgaaaacccacatgtcccacatctacgcgaagctgggcgtgagcggccgccaggagatgatggacctcctgttcggcgagacgaagggcggcatcgacgcctagggcgcgcatcggcgccgctcgcggaggattttccgtttgttaacgaaccgtaaggttccacgtggctataatccgaatactttagcgtgcgaaagtgcccctgccgaaacggcttttgtcgcgtgtcgacggcgttcggaacctgcttcgggaccggctcttttctcgcaacggggcgtactggcaaagacgagagaggggacgtgcatggacatcgtccagatgatcagcgatatcgacgccttcgtatggggcccgccgatgatcgtgctgctgttgggttcgcatctgtacctgacgatccgcacccggttcatccagcgcaagctgccgacggccatcaagctgtcggtgacgaaggacccggatgcgccgggcgacatcagccagttcggcgcgctgaccacggcgctgtcggccaccatcggcaccggcaacatcgtgggcgtgggcaccgccatcctggccggcggcccgggcgcggtgctgtggatgtggctcaccggcgtgttcggcatggccacgaagtactccgagacgttcgccgccgtgaagtaccgcgtgaaggaccacaacggcaacatgctgggcggcgcgatgtacgcatggcgacgcgcgttcgagaaggacggcaagacgccgtggtggggcttgctgggggccggggcgttcgccctgttcgccgccgtcgcctcgttcggcatcggctcggccgtgcagtccagcgccatgaccgggatcatcacgtccaacgctcccggcgtgcccacctggggcatcggcctggccatcgtcatcatggtgtccatcgtcatcttcggcggcatcaagatcatctcgaaggtgtgcgagaagctcgtgccgttcatggccatcgcctacgcgtggggctgcatcgtgatcatcggcatgaactgggagtacgtgtggcccgccatcagcctcatcttcgagtgcgcgttcacgccgaaggcggcgttcggcggcgcggtgggctcggggctgatgatggcgctgcagttcggctgcgcgcgcggcctgttctcgaacgagtcgggcctgggctcggcgcccatcgtggcctcggcggcctccacgcgcaacccggcgcgccaggccctcgtgtccatgaccggcaccttctgggacaccgtcgtcatctgcgcgctcacgggcatcgtgctcgtgtccacgatgatcgcgaacccgggcatcatggagagcggccaggtttcggccggcgccgatctgacgagcgcggccttcgcgtcgatcccctacatcggcacgcccatcctggtcatcggcatgatcctgttcgcctacaccaccatcctcggctggtcgtactacggcaaccgctgcgtcacctacctgttcggcaagcgcgccatccgcccctatcaggtgctgtacgtggtggtggcgttcctgggggccatcggcatcggcgatttggtgtggaccatctccgacatcacgaacgcgctcatggccatcccgaacatcatcgtggtgctgctgctttcgggcctcatcgcgcgcgagacgaagcattacgtgtgggacaagaacctggacgagacggacgacacgcccatccccgtgcttgagtcgaagtagcgtccgcacgcgcagagcgcggcggcgagggtgcggcgagggccccggcatcgaaaggtgccggggctctttgcgttcgggggcgggggcccggcgcgtcgccacccggtgggcgcaaaacgggagctgtggcaacagtcgggtgcgaaaaagggcgatgggcttgtgcgattgcaagaaagccccaggtggggagaagcagcggcggggtgcagcgtccgaaaatgccgttgaaattgtcatggcttccgattcgcgcccgcgaatcgtccgatgcggtatcatggcggcatgaagaaactgatgatcataggcggcggcgcggccgggctcgcggccgcggtggccgcggccgacgcgctgcgggcgcgcggcgtccgcgtgggtgcggatgcgggcgcggacggcgtcgacgtggcggtatgcgaggccgacgagcgggtgggacgctccatcctggccacgggcaacgggcggtgcaacttctcgaacgcgcaggtggacgccgcggcgtaccgcaacgcggcgttcgtgggcgcggcgttggacgagctgcggcgcgcgggcggcctgcgcggcggcgacggggccgacccggtgcacgcgttcttcgccgacctcgggctcgtctggcgcgaggagggcgagggccgcctgtacccgctggcgaacaaggcgacgagcgtgctcgaggtgctgcgcgcggccgcgtcggacgcgggcgtgcgcgaggagtgcgggcgggaggcggtgcgcctcgacgcgcccgcgcgcaagggcgaccgcttccatgtgcgcttcgccgacggagcggtgctgcatgccgaggcggtgatcgtggcggccggcgggaacgcggcccgcgcgctcgtgccggaaggcctcgcctgggaggagccgcgcgcggtgctcgggcccctgcgtacggatgcgcgcctcgtgaaggcgctcaacaacatccgcgtgcgctgcgcggcatcgctcgtcgggcgggacggcgcggagaaggcgtgcgagcggggcgaggtgctgttccgcgactacggggtgtcgggcatcgcggtgttcaacctgtcgcggttcgccgagccgggcgacacgctgcgcatcgacctgctgccgcagcacggcgaggcgccgctcgaggagctgctgcgcgcccgcctcgcgagcctgcgcgagcgcggaggcgcgggcacgggcgacgacgcgctgcgcggcatgacgctgccggcggtggggcgcgccgtgctgaaagcggccgggctgcacgccgagaagccgctcgcgcagcgcgacgtgccggcgctcgtccgcgcgctcaagggactcgcgctcgaggtgcgcggcgtcggcgaggcgcggcagtgccaggtgcaccgcggcgggttcctcgtggaggcgttcgatccgcgcacgtgcgcggcgcgagcggtgccgggtttgcacgtggtgggcgaggcgctcgacgtggacgcgccctgcggaggctacaacctgcactgggcgtgggcgagcggcatgttggcgggtcgcgccgccgcggagagcctgatggaaggagcgcgccgtgcttgaggtgtcgaacgtgaagctgccgctggacgcgggtctgcccggggcggcggcggaggcgctcgtgcgcgcggccgccgccgcggcgctcggcgtcgcggggcgcgacgtgcgcgcggtgcgggtgctaaagcgcagcgtggacgcgcgcaagaagcgcgacgtgcacttcgtggcgacgctcggcgtggagctggccgaagccgccgaggaggagcgcgcgctcgccgcggcgggcgcgcgcgggggcgcgggggcggtcgtcgggacgcaggtgcgccgccacgcgccctacgagccgctgcgggtgccgtcgtgcgccgcgggccgcgaggccggcggcgagccgcgcccgatcgtggtgggtgcgggcccggccgggctgttctgcgcgctctacctggcgcgcgcggggctgcgtccgctcgtgctcgagcgcggcggcgacgtggacgagcgcctggcgacggtggccgcgttcgaggccggcggcgacctcgacccgcagacgaacatccagttcggcgagggcggcgccggcacgttctcggacggcaagctcacgacgaacatcaagaacccgctcgcgcgccacgtgctgcgctggttcgtggacgcgggcgcgcccgaggagatcctctggcaggcgaagccgcacatcggcaccgacctgctcgtggacgtcgtgcgcaccctgcgccgccagatcgaggaagcgggcggcgaggtgcgcttccatgcgcagctcgaaggcctgcgcttcgagggcggcgcgctcgcgggggttgacgtgcgcgacgggcgcacgggcgtgcttgagcgcgtcgacgcgcgtcgcgcggtgctcgcctgcgggcactcggcgcgcgacacgttcgccgtggtgcacggggcgggcgtggcgatggagcagaagccgttctcggtgggcgtgcgcatcgagcatgaccagggggcggtgaaccgtgcgcagtacggcgacgccgccgcgcatcccgcgctcggcgcggccgactacaagctggccgtgcacctgccggacggccgcagcgcgtacacgttctgcatgtgccccggcggcgaggtggtgtgcgccgccagcgaggagggcggcgtcgtggtgaacggcatgagccgcttcgcgcgcgacggggcgaacgcgaacgcggcgctgctcgtgggcgtgggtcccgaggacttcgagggcgatgatccgctggcgggcgtcgagctgcagcggcgcatggagcgggcggccttcgaggcggcgcgctccgcgggcggcgaggcgtaccaggcgccggcgcagacggtgggggacttcctggccggacgcgcgagcgcggcgggcgcatcggtgcgccctacgtacgcgcgcggcgtggcctggtgcgatctgcgcgcgtgcctgcccggtttcgtggccgacgcccttgccgaggcgctgcccctgctcgatcgccgcttgcgcgggttcgcggatgcgggcgcggtcatgaccggcgtcgagacgcgcagctcgagccccgtgcgcatcgtgcgcgacgatgcgctgcaggcgcgggtggaaggcgcgcccgatgacgcgcccgaaagcggcctctacccctgcggcgagggggccggctacgccggcggcatcatgagcgccgcctgcgacggcctgcgcgtggcccgcgccctcgcaagcgcgttcgaaccgcgttagattcgcgttggaaacatcggcagctttcgtggaaactatgttcgaaacatgtttgatttgcgcaagatccgacggcaaagagcgctggacgcacgccatcgaaacgtgagatcaactctctatacttatgcaatgaggcgcaacgtggagcggttgcgtcaaggatgctatagtaagggagatcgctgtggaatctaagacgctattggatcgagaggagctggcgatggatgtgaaagaggctgcgaaaagggcagctgcctatactgcagatatagagactgttatggacccaaagagcctttctgagtttctttccaagtcggggttcgcaatcgaatcgacgcattgcgacgatgcgcataaccgttgggagatcggagtcggcttcgttagggagttcgatcgcggagggatcgatggcatcgcttcgttgtcgtcggtttgggatcgtatgcctctccaaggaacccgaacgtacaaaacggtgacgatatccgacgaaagcggcgacgttgtttcgtacgagtagccgatatgaaagcgatactcgacgccaatctactgctcgtgcttcttgctggttcctgcgataagcgaagtctcgggcaaaagaaattcgtgaaggattacggagcagacgattttaacatgctgcgtgaaatgctttcgggtttcggggaattcttcgtcacgcccaatgtaattaccgagtgctcgaatctgctttgcggacgcggcgggcacggcaagaacgaaccagaggctcgcgttttagcgacactattcgagtcgggtcgtctcaagcgcatcgaagagcgctatatcgaaagccgtgtagctttccagcgtggggagtattcctatcttggcgtgaccgattgctcgctgctcgccctcgttgatgcggatcatgtgcttgttactgcagatggtgcgttagctcgtgcagctcaggcgatcaatccggcttgcataaacttcaatcacgtacgtaatcgctcattactcgacccccgccgctagaactcgatgccgcggcgggcgatgacgccctcctcgtagtagtgcttgacctcgcgcatctcggtgacgaggtcggccacggccatgagcgtgccgctggcaccgcgccccgtgaccaccagctccacggtttcgggccgctcgagcgccaggtcgacgagcgcgtccggctcgaagtaccccaagctgtcggcaacgttcgcctcgtcgagcaccacgacgtcgaacgcgccgcccagcaccgcctcgcgtgcggcggcgagcccgcgccgcgcggcctgcgcgtcgtcctccgggtcgggggcgctcaactcgccgcccgtgccgaactgctccgccacgatgcggtcgccgaacaggcgaaacgcatcgagctcgccggtggggccgtacttcatgaactggcagaagtacacgcgcagacctgcggccgccgcccgcatcgccaacccgacggcggccgtggtcttgcccttgccgtcgcccgtgtacacctgcacgtatccttgcttcatcgtcattctcccagttcccgcgcccaatcgaagtcttccggcggcgcggtgggcagctcgccctcggccgtgccgtccgcgtgcccgtcccactggcaggcgtccatgtccacgtgcgtgtcgtcggcgaacgccaccccctcggcttccagcatctcgcgctggatctcggggccgccgaacgcgaatcccttgcacaagccgccgtccttgaacaccacgcggtggcacgggatgttgttgacctcggcgccggggtcggggttcgcgtggagcgcgtagcccacgtaccgcgccgagcgcggcgcgccgatcagccgtcccacctgcccgtacgacgccaccttcccgcgcgggatgcgccgcaccacctcgaacaccctgttggagaaatcgcccatgctctcttcgctcctcgcattcgctcaacgtttcgccccagtatacggcaaccgcgcccgggcgtgagcgagctgcgcgaggccgttgaggcgtatctggcgcgcggctgaagagcgcgcgcggattgcggcttcacttttcccatcgttccacttatgattgatgcacggctgttcctcgagaaccgcccccgcttctttcgcacgggaggtagtagatgggtccgatcaacaaccgtcgtcagggcgctccggacggcaccgagcctttgagcgctcaaccgagccccttcgatcagaacgctttcgatcgcatcgcgttcgagccgatcgagggcctgccggggccgaccgacctcgtcgacgccgaggcgctcgccgacatgcgggcgttcaacgacctcaaggcgaagcgcaagaagcagcgcaagcgcaagatcatcatcggcgccgtttcggccgtggcggtgctcgccgtcgcgggcggcgcgttcgcgtggtacgcggccgaccaggcggccaaggcgctgcaggacatggccccgcagaccggcttcgtggagcagggcacgttcgtcgagacggtgtcggcgtccggcaacctgcaacctgtcgcgtcggtgagcgccacgcccgaggtggacggcatcgtgggcgaggtgctcgtggccgaaggcgacgcggtggccgagggccagacgctgttcaccgtggtcaacgacgagctggacaaggcggtgaaccaggcggcccagggcatcgaggaggccaagaacggcgtggcccaggcccagaacgccgtgaacgacgcctaccacgccaagtccgccggccagcaggccgccgcgaacgcccaagcccaggcgcaagccgccgccgcggccgccaaggaggccgggggagcggcggccgagtcgttcgccggcgagcaggcttccttcgacgagtccagcgccgactccgccatcaggtcggccgagctcggcttgagcaacgcgaacctcgcgctgcagaacgcgcagagcgcctacgacgaggccgtcgcgcgcgccgccaagcgcacggtgaccgcctccatcgccggcagcgtcgtcgcggtgaacatcgagcccggcaaggcgctcggggccacggcgagcgccgcgacctcgcccgtgcagatcgccgacctgtcgcagatgaccgtctccatcaacgtgaacgagatcgacatcctgaagatcaccgccgatcagactgccgaggtcacgttcaccgccgcccccgacctcacgctgcccgccaccgtggtgagcatcgccaccacgtcggccggctccggcgatgcgtcgggcggcgccatgtacggcggcatgggcggtgccgtcacgtacgcggtgaagctgctcatcgccgagcccgacccgcgcctcaagcccggcatgaccgccaaggccaccatcaccacgaccaccatcgagaacgcgctcatggtgcccatctcggccgtgcagtccgacggcgcgggcggcagcttcgtgatggtgctcaccgaccccgagacgcaggagatggacgcgcgcacggtggaggtcgtcgcgtccgacggcctcacgtccgtcgtgaagggccaggtgaaagccggcgacgaggtggtcgtcggcggaggcatgggcggcgcggtggacggcatgggcatggcgggcgacggcgggatggccgcggtcgacgccggcggcagcgtcatggtggggtagcgccatggccaacgtggttgaagccgtcgacctgcaccgcatctacgagagcgcttcgggctacacgcacgccctgcgcggcgtgtcgctgacggtcgcgcagggcgagttcctcgccatcatgggcccgtcgggctcgggcaagtccatgctcatgaacctgctgggctgcctcgacacgcccacgcgcgggcgctacctgctcgagggcgtcgacgtggccgactaccgcgacgacgagctcgccgagatccgcgccacgcgcctcggcttcgtgttccagtcgttcaacctgctgccgcgcgccaccgtgctgcgcaacgtggtgctgccgctcatctacacggcctgcccgcgcaaggagcgcgagctgcgcgcccatgcggcgctgcgcagcgtgtcgctcgacgagcggctgtacgaccatcgcagcaacgagctgtcgggcggccagatgcagcgcgtcgccatcgcccgcgccctcgtgaacgacccggcgctcatcctggccgacgagcccaccggcaacctcgacaccgccacgggagacatggtgctgaacacgttcaagcgcctgcgcgacgcgggcaagaccatcgtgctcatcacgcacgagcccgacgtggccgcccacgccgaccgcgtggtgcacattcgcgacgggcggctgtacgagggggcgcacggcggggaaggggcgcgcccatgaagatcggcgacctgttctacgaaacctggcacgcgctgtccgcgaacaagggccgctcgttcctcaccatcctcggcatcgtcatcggcatcgcggccgtcatcgccatgacctcgctcatcgcgggcgtgcagaacatgctcatgggcgagatggggctttcccaggcgcgccaggtgtccatcagcgcgtactcgccgcagggcatcacgttcgacgacctggacaagctggagcagggcatgccggagtacgaggtcatcaccggcgcgtcgtacgcgtcggccgagatcgcgatggccgacgggcagaagaactacgccaccgtcatcggcgcccgccccgactatttcacggcgaacgggacgaagctcaaagcgggccgtttcttcaccgaaagcgaagagcagaacgcggcgcgcctcgtggtgataggcggcggcgagatggccgtgcagatgctcggcgtccccgacaccgaggcggtggggaagacggtgcgcctcggcaacgatgattacacggtgatcggcgtgatggaaacctcgtcgttcatgggtggcggcgggacgttctacgcgccctacaccacggtggaaacgcgcatcggcaacacgggcggcatccagcagatcgtcggcttcgcgcgcgagggaaccgacatggaccgcctcgtcgagacgacccagaccttcgtggcgcagtacttcaacctggacgccgaaagcgtgtacgtgtcgtcgctcgatgccgtcatcaagcagatggagacgatgatggcgtcgttctcgctgctcatgggctcggtggcgtcgatctcgctgttcgtgggcggcatcggcatcatgaacatgatgctgacgaacgtcaccgagcgcatccgcgagatcggcctgcgcaagtcgctcggcgcgcgccgccgcgacgtcacgaagcagttcttgctcgaggccatcatgctgtgcgtggccggcggcgcgttcggcatcgtgttcggcttcctggccgcatggggcctggggcaggtgatcggcgcggtgcaggccggcatggccgtcacgccggtgctcgcgccgggcgtggtgttcggcgccgtggccgtgtgcgtgctcatcggcgtcgtgttcggctactacccggcacgccgcgccgccaagctcgacccggtggagtcgctgcgctaccagtaggcggccggcgggcggcaagctcggaggttgcgcccctttcgcgtcgttcgtcgacccaagaggtggtagaatgcatcaagcatgaagaagacgtctcggatcgtgggaagccgggtgagaatcccgcacggtaccgccactgtgtttcggccttgccgatcagccagaataccgaccgagaagcgtgtgtgcgcaagcggcgagttaccgcgaacgcaacccggagggcaagaaagccctcggcttgtctgcgtagcgaatacgggctgcgcggccccctcgaatcgcgagggccgcgcagccttttgttttgctgtctctcttctgcgaagcgaccgatgaaaggagaaggaagacggtgaaggaacaaacgatcatccctgcgggggtcatgcggcgggcgtgggccctcctgctggccgccgcgctctgcctgggcctcatgcccagcgcagcctgggccgaagaaagcgagggtgcggggacgttctcggtggcgctcaccatcgtggacacgtccgaccccgcggacggcatcctgtacaacggcaaggtcgacggcatgacctccgacgacacggttgccgacctgctggcgaaggcgggcttcaccgccgcggccagcgcggaggagaccgaggggaacgacaaggcgtacttcgactcctggggctccccgacgttccgcggcaacaagtcggtccagcagcccgacggctcgtgggcctattgggcgacgatgttcgacggcgacagcgcgaactacgccagcgcccagctgacgtcgaagctgcaggagaacggccgctaccagtacatctacacgtccgacgcgacgttcgcctacgacgaggaggcttccggatttccggtgcagctcaccatcgtggacacgtccgaccccgcggacggcgtcctgtacaacggcaaggtcgacggcatgacctccgacgacacggttgccgacctgctggcgaaggcgggcttcaccgccgcggccagcgcggaggagaccgaggggaacgacaaggcgtacttcgactcctggggctccccgacgttccgcggcaacaagtcggtccagcagcccgacggctcgtgggcctattgggcgacgatgttcgacggcgacagcgcgaactacgccagcgcccagctgacgtcgaagctgcaggagaacggccgctaccagtacatctacacgtccgacgcgacgttcgcctacgacgaggagattcctcagctcgcgatctacaccgtcaacgaccccttggcgggggcgatcaagcccgatcccaagcccgaacccgaacctgatgagcctgccaacgatgccatcgcagtagacagcgctgcgtacaacacgctgttcggcaccatcgccagttcctatgcgggtacgtccgaggaatggaaagcccttgagctcgcggccgccggtcgtgtgtcgtcggttgacgtggcgacgctcgtggcgaatgcgaaagcggcgaacggttctcccgaaaccaccaatttgcaacgcttcatcttggcgctcacggccgtcggcaaaacagaggaagcagcggagctcgtgcaaacgatggcgacgtccgacatttcgactacctatgtgaacggtcaggcgtttgctctgctctcctacgaaagcggtgcgtacgacgcgcccgcgaacgctcttgaaaccgaagctgagcttgtggccaagcttctgagcgcgcagcaggcttccggcggctggacctggaaaggcgctgccgaaggggacgatcctgatacgacggccatggtgataaccgctcttgcctctcgcgtttcggacgcctccgtcaaagcggcggtcgacaagggtctcgaggcgctgcgcgcaatgcagcacgaggacggcggtttccgcgcatccggggacgcggccgatggtcccatcaacgtcagctctacgtcctgcgtcgtggtcgccctgtgcgccttgggcgcggatccggcggcatccatggtcaccgaaagcggcgcgacgccgttgagcgcgctgctctcgcaggccacttccgacttgtccggattcgtttacaacggcgctgcgaacgacctcgccaccgagcaggggttccgggcgcttgttgcgtaccagggcctcaagaacaccggggcggcgtacaacgtctacacgcaggcgaagctcggccaggctgcgctgcccgccgagaagcaggaagaaagcgacgtcaagcccgcaggggctccggcggccgacaagaaggcgctcgccaagaccggggacggctctgcgccgttcgcggccggcactgccgcgctcgcgctcggcgcgctcgcggcgggcatcgccgccacgcggcgcatgcgcgcttccgatgagctctcgttgcgccgataggatcgcggcagcatgagcgaagattcgaacgagaagaccggcggctcgggtgtcgaaacgctcgagccgcgtgagcgggccgaagcgcccgacaaccgcatcgccccctccgcgcctcgcggcgaggagggggcctcggtgggcggggcatccgcaacggcggcgtccgcgccctcgtctcgccgacctcgcaaggcgctgctcgccaccggcgtcgttgccgctgcggtggccctgtgcgccgtcgtggcgagcatgggcttcgccaccggatggctcggcaaccctgcgccgtccgatccggtgccgatgcccagcgtcgtcacggatgcgccctctgacggagacgacgcgtcgaaggacgacgagaccgatcgcaaggatgccgccgaagaggcttcggagggcgcggacggggaaacgggcgccgtcgtcgagggcgaaggcgcggcgggtgccgacggctcggccgcttcgacggccggcgaggcgccatcgggcaccgacctttccgcgtcggagggcgctgctgcaccggctccggagcctgctcccgaaccggccccggctccctcggctcccagcaccgtcacggtgacggtatacatcgacagctcccgcgccgcgtccaatggctacccctcatccttgggcggcggcacggtcaccctcaaccagggcgcatccgtctacgatgccctctgcgctaccggagcgtcggtgggcgggtcgagcggctacgtcagctccatcggcggccttgcggaattcgcttgcggtcccggcagcggctggctgtatttcgtcaacggatcgtcgcccggatacgggtgcggttcgtatatcctaagcggtggagaaaacattacgtggatatacacctgcgatttgggcaacgacctgtagatgtgcggctagaggaaagtggggtaccgtgttcagcaatccgaaagtggccaagatcatggctgcattggcgatcttcttcgccgtgctcgtggtgatctcgatcttccaaacggtgcacgcctaggggcgcgcctcgtatgaagcgcacggcgttcgacctgttccatcccgtcgtggcgttcggctacttcgccgtcatgttcgcgctcagcatgacggcgatgcagccggtctacttggccatctcgcttgcaagcgtgctctcctacagcgcggtgctgtgcggttggcgggcgacgggtcgctcgcttctctggcagctgcccctcgtcgccgtcgtcgcgctggcgaacccgctgttctcggcgtccggctccaccgagttgttccgcctcgggctgcgcgcgttctacctggagagcttcgtgtacggcgcatgcatgggcatcatgctgatcagcgtgatcgtgttgttctcgaacgcctcccaggtgctcacgtccgacaaggtcatgacgctgttcggcggcgtcgcgcccacgataggcctcatgctgtcgatgacggcgcgcctcgtgccgcagttcgtgcggcgcggcaacggcatcgccgacgtggagcgcgcgtgcacggcggcgcgccctgccgaggagcccgcagggaagctcgctgtcatgcgcggctacctgcggaggacttcggtgctcatgggctggggcatggaagactcgctcgagacggccggcgccatgaaggcgcgcggctggggggccgccgcgcggcgcaccacgtacgcgcgctaccggttccgtcgcttcgacgctgcggcgctcgtcttcggcggcgcgctcgcgttgctggccgcagccgccgcctgggcggcatgcgcgcaattccgtttctatccgacgatcggcgggctcgcgccttggtggaactatctgccgtacgcgctgttcgcgtgcctgccgctcgcaatcaccgcgaaggagcatctgcgatggcgagcgtgaaggcgatcgaggcgcgcggtttctcgtttcgctaccctgagtcgacggccggcatcggcccgctcgattgggcggtggaggagggcgcgttccagcttctggtgggcgccacgggcagcggcaagaccacgctgctcggtagctgcaagccggccatcgcgccagcaggggagcgcgcgggctcgctgcaggtgttcggacgatccgtggaaaagctggatgcgcgcgaggccgccgcgacggtgggttacgtcgcgcagagtcccgagaaccagatcgtgtgcgacagcgtgtggcacgagctggcgttcgggctggagaacctcggcgtggagcaggacgagatgcgccgccgcgtggccgaggtcgctcacttcttcggcatcgagccgtggttccgccgctccgtcgccgagctatcgggcggccagaagcagatgaccacgttggccggcacgctggcgatgcagccgcgcctgctgctgcttgacgagcccaccgcccagctcgatcccgtggccgagaagaacttcctgcacgctctgtttcgcgtgaaccgcgagctgggcatcaccgtcgtcgtggccacccacgcccccgaggcgatggccgagtacgcgacggacatggtggagctgcgagagggcacgctgatccgctgcttcgaaccgcgcgccggggtgtcggccttccgtcgttccgaatccgtcccggtggcacccgcctccgctcaggatgatgaagccgcatacgccgtctcgttgcacgacatccatctgcgctacgcacgcgatgccgactgggttctgcgcggctgcgatctgcgcgtcaccgccggcagcatccacgccgtcgtaggcggcaacggctgcggcaagtccacgctgctgcgtgccatcgccagggtcgtcaagccggagcgcggccgcgttgagaactgcctggccgcgcgccaggcgctgctcccgcaggatccgaaaaccctcttcgtgtgcgatacggtggccgaggagctgcgcgagtggcaggcgaactgcggctacgacaacgctgcgatcgatggcgttctcgcgcgcttcggtctggacgcgcgcgtctccaaccatccctacgatctgtcgggcggccagcagcagttgctcgcgttcgcgaagctgctgctgaccgatcccgacctgctgctgctcgacgagccgacgaaggggctcgacgcgccgtcgaagctgctggtcgcccgcaccctgtgcgatctcgcgcaggccggggcgaccgtcgtcctcgccacgcacgacctgacgttcgccgcgctcgtcgccgatgccgccaccatgctgttcgacggggaggccgtgtgcaccgagccggccgccgcgttcttcgcgggcaacctgttctaccgcccgaccgaggatgcgttctcccggctgtggcgcgaggaacgctcgtgacgcgcccgccttcccgcgcggcggcgcgcctcctcgcgctgctcgaggtgccggcgctcgccgccgtgcccctcgtgctgggcgtgtgcgcgtacttccaggtggagcagggcgcgctgctcaccgtggtcgtggccttcgcggcggtgggcgtgttcttcgccagctttgaggcctcgcgcccggcgttgcgccagatcatgccgaccgtggtgttggcggctcttgcggcggcgggtcgcatgctgttcgctcccgttcccgacttcaagccggtgtcggccatctgcatcctcgcgggagccgtgttcggccgccgcagcggctttctggtgggcgcgctcgcggcgctcgtgtccaacttcttcttcgggcaggggccgtggacgccgtggcagatgtacgcttggggtctcgtaggctacctggccggcgtcctggccgaccgcggctggctcgaccggctgcccgtgctgtacgcttacggcttcctgtcggccctgctgtacggcctgctgctgaacgggtggtacgtcatcggcttcgtgcagccgttctcctggccggccgcgctcgtcgcgttcggcgccgcgttgccgttcgacgcgacgcatggcgtggccaccgtcgtgttcctcgcggcgctctacgttccctggcggaaaaagctcgagcgcatcaagaggaagtacgcgctgatctgacggatgccgccgattgcggcgcggcggccgtgcgcgtgctacaatgcctcccgatcatcgaagaagggagctcccatgccgccactgtccagctcgaagcgcgaagccgtcgccgccctcaagcgcggcgaggcggtcatctttcccaccgagacggtgtacggcctgggcgtgtccgtcgaggcggcggcgagccccgaggcgctctacgatctgaaggagcgcgaccgcggcaagcccgtctcctggctcgtgggcggcgtcgacgacctcgaccgctacggagcgcacgtgcccgacctggcccgacgtctggcacgagcgtactggccgggacctcttacgctcatcgtggaagcgagcgacgccgtgcccgcggccttccgctcggcggcgggctccatcggcctgcgcatgcccgacaacgatacggcccttgagctcatcgaggcggtcggctgcccgctggccaccacgtccgcgaacatctcgggtctgcaagcgccgggggccttcgacgcgctcgatcctgctctcgctgcgtgcgtaggcgtggtggtgcccgacgacaccgacgacgataagagcggcgtggcgtccaccgtcctcgactgcaccgtaaaccccccgcgcattctccgcgaaggcgccgtcaccgaagccgatatccgcgcggcgaggtagtcgctcggccgccgccgcggcggtcggcgcgctctccgcatccgccctccttgcccacaccccccccctcatatattgttcttgccacttctcgcgcagtggccgcgctcttttcttgcagatgcgaatgtgagataagggatgcgtatggggcggagggcgcttgccgcacccccccaggagccaggctctttaaaaaaggctggcgcctccggcccgcaggtggacgcgaattaggcaggatggcgcgcggcgccgtatatccaatgaggttgcgcctgcggttaccagaggaaggacctctgccctacggtcggaacgaggagcggaggaggaacaccatgatcttcgtcggaatcgacatcgccaagaggagccacgtcgcaagcgccgtcgacgaggacgggggcaccgtcgtcgagtcgttcaagttcaacaacacggcgagcggcttcgcgaagctcctgaagaggcttcgcaaggctgacgcgaccccggagaacagcttggtcggaatggaagccacggggcgctactgggtggccctgttcgacttcctctcctcccacggctacgaggccgcggtgatcaaccccgtccagaccgacgccttccgcgacgtctggacggtccgcaaggtcaagaccgacgcccttgacgccgcgatgatcgccgacctcgtccgctacaagcgctactcgccctcggcgctcggcgacgaggcgaccgaggagctgcgcaacctcgcccgctacaggatgtcgctcgtggagcgctccacagccttgaagaacagggcgacggccatcctcgataggacgttccccgagcttgcaggcctgttcagcaacgcgtactgtccgacccgccgcgagctgctgcagcactgcgccacgcccgaccaggtgctcggaaccgacgtcgggacgctcgagcgcatcctcagggaggcttcgcgcgggaggtgcgggcgagccaaggccgagcggctcaaagcgctcgccgaagcatccgtgggcgtcgggttcggctccaagacgctcgccttcgaggtgaggctcctgatggaggagctcgacttcgtccaagggcagatcaaggaggtcgaaggggagctggaatccctgctggagcggacccggggaaagtggctcgtcaccatccccggcatcgacgtgccgctcgcgtccgtcatagccggcgagataggcgaccccgacggcttcgacgacccccacaggctcatggggtacgccggcatggatcccacgaggagcgagtccggcgagaccgtgaagtccgacgggcgcatgtcaaagcgcgggcccggggcgctgcgatgggctctcatgcaggccgccgactgcgccaggaagaacgacccctacttcggagactactacgacaggaagaagggcgaggacaagaagcaccactacgtcgccctctcaggcgtcgcccgcaagctcatgggcgtcgcgctggcggtgatgaaggaggagcggccctacgagccgacccctcccaagaaccaccggcccggccatctgagaggagcatgatccagccgtcttccaccaaccgaatagcgacgcatggcatcggcgcctccgggggccgtgcgcaagcgtgcgtcgcccttgtctcgcattcgcttttcaaggttccttaaaaagtttcgtataccccttgactcctaatagcaggtcttttttttggcacagattcaccgctatgcacgattttcggcgcatgatttcagtgcgagcgcataaaaccctaggtcagatttttcgcatcaggaaaaaatcatgcataacggtgaatctgtgccagcaaagcgacggttcccaagctccatcctcgtttccctcgcctcctcaagcctccttgagccttccgccttgccgaacgcgcccggcagggcgccgtctttcacgtaacgcttccgcgcttgcggttcgcgtgcgggtataatagggcaaaactcctggggaggggatcaatatgggtagcgtcccgaaagttggtgtatcaatccgtttctggagggcgggcgaagcctgcccgagaaaaacggacatcgtctagaatcgtcaatcaccacaaaagacagattcgaaggaaggcgatgcccgctatggacactctactattcaacgaccccgaagtgaaggggctcgcgttcgcgatcctcgaggaatgcaccgacctgcaggccttcgggcgcaggatgctcgagctcctggcgaacgccgcgatgtcggcgaaggccgacgaggcgtgcaacgccccctacggggagcgcgacgaggggcgcgtcaactcgcgcaacggctaccgggagcgggggctctcgaccgccgcgggcgacgtcaccctcaagattccgaagctgcgccgaggctcgttcttccccgaggacctgatcgagcgctactgcagggtggaccgggcgctcgtcgcggcggtggccgagatgtacgtcatggggatatcgacgcgcaaggtggaggccgtcgcgggcgagctcggcgtgaggtcgatgtcgaagtcgcaggtgtcgcgcctgtgcgagtgcctggacgccgaggtggacgcgttcaggaggcagcgcttcgacggggtgcgcttcgcctacctgtggctcgacgccacctacgtgaagtgccgcgtggaggggcgctcggcgtcccaggccgtcgtgaccgcgatcgggctcgacgacacgggccacaagcgcttcgtcggcgtggactgcgtggacacggagagccacgccgggtggaaggcgttcctctccggcctgagggcgcgcggcgtcgacggcgtgcgcctcgtcgtctcggacgcccacgaagggctcgcgaaggcgatagccgagacgttccaaggagcggcctggcagcgctgcgtcacgcacctcatgcgcaacgtggcgggccgcatccacaggaaggacgaccagagaaaggcgcgcgaggccatgaaggccgtcttcgcgcagaagagccccgtcctcgtgcgggcgtgctaccaagaggcgaccgaggaggtgctgaagatctcgagggcggccggaaacgtgctcttggaggccgaggaggcggcgctcgcctacctggcgttcccggccacgcaccgcaccaagatccgcaccaacaacgtccaggagagggccaaccgcgagatcaagcgcaggacgcgcgtcgtgcaggggttcccctcgcgcgagtcgctcatccgcctggtgggagcggcgctcatcgaggccgacgaggagtggtcggcgcgctgcgtcatctccaggccctcgctcgcgcacgcctggaaggcccaggagcgcgaggcccccggcgaggccgaggtgctcgccgcccgcgaggcggcgcgcaagatcatagggagcgccattgacccgaaggaggacgaaggctaagattcacctcgcaagggtgccggcgattctccggcgatggccctgatacaccacgattcgggacgcggcctcaatatggatacaacggtcgcagtcgcgccgatcggctttttgtctcatgacggaacgtccaccatcaaaggcctcgtgtgggagcccgagcgcacgaggggcagccgccgtgtcgcgccgcgcggcgtcattcagatcgtccacggcatggtggagcatgtgggccgctacgacgagttcgcgcgcttcctcgtggaacagggcttcgtggtgtgcgccgccgatcacatcggtcacggcaagagcgtggccagcgcagacgagcttggctgcctgcccgtcgacggcaaggagacgctcatcgaggacgtccacgaactgcgcaagaccgtcaccgcccgctactcccgccaaaccccttacatcatgttcggccattccatgggaagcttcgtcacgcgcgcctacctggcgcgccacggcgaagacgtggtggcggccgtcatctgcggcacgggccaacagcccctcgtcctgtcgaaggcgggcaacgcgctggcgcgcttcctcgcgaagacgaagggcgccgactaccgcagcaagcttctggacggcatgggcgtgggcgcgttcgccaagcagatcgagaacccgcgcacgccgcacgactgggtctgcaccgatccggccgtcgtggacgcctacatcgccgacgagctgtgcggcgccatgttctccgtcggcggctacgccacgctcaccgacctcacgggcgaggtggtgtcgccgtcgtgcgcggcgaaggtgccgaagggattgcccgtgctgttcgtcgccggcgccgaggacccggtgggcgcgtgcggcaagggcgtgcgcgcggcggccgacctgttgcgccgcgccggtgtgcaggatgtggaggtgaagctgtacgagggcatgcgccacgaaatcctcaacgaaccggggcgggctcgggtttatactgaggtggtcggttggattgaggagcatgcatgccaaagtacgtcgtagcgctcgaccagggtaccacctcgtcgcgcgccatgctcgtcgacgcgaacggatgcgtcgtcgatgcggtgcagaacccgttcccgcaaatctacccccaacccggctgggtggagcacgacccgcgcgacatcctgtcgtcgcagctgggcgcgctcaccgagcttctggtggcgcacaacctgggcgcaaaggacatcgacagcatcggcatcacgaaccagcgcgagaccaccgtggtgtggaaccgcgaaacgggggagcccgtgatgaacgccattgtgtggcagtgccgccgcactgcccccatcatcgacgagctgacggccgatccgcagacggcgcgcatcatcgccgacaagacgggcctcgtgcccgacgcctacttctccgccagcaagatcaagtggatcctcgaccacgtggaaggcgcgcgcgaagacgccgaagccggcaagctggccttcggcaccgtcgacacgtggctcatctggacgctcacccagggcaaggtgcacgccaccgacgtgacgaacgccagccgcaccatgctgtacaacatccacgagctgcgctgggatccgtggctgctcgacctgttcggcatcccggagtccctgcttcccgaggtactcccttcgtcgggggagttcggccgcacggcttccgcgggcatcgtgccgaacgtgcccatctgcggcgtggcgggcgaccagcaggcggccctgttcggacagtgctgcttccagccgggccaggcgaagaacacgtacggcaccggctgcttcctgctcatgcacaccggcggcgaagcgtgccgctccacgaacaacctcatcaccaccatcgccgcctcgggtccgggtgccggccccgagtacgcgctcgagggcagcgtgttcatggccggcgcgctcatgcaatggctacgcgacgacatgggcatcatcgacgacgtggccgagacctccgccatcgcccgcagcgtgaatagcaccgacggcgtgtacgtggtgcccgcgttcaccggcttgggcgcaccctattgggacgccgatgcgcgcggcgccatctacgggctcacgcgcggaaccggccgggctcacatcgtgcgcgccgcgctggaatcgctggcctaccaggtgcacgacctcgcggtggccatggaggccgacgcgggggtgcgcttgagcgtgctcaacgtggacggcggcgcgtccgcgaacgattttctcatacagttccaaagcgatatcttgcgcacgccgctgcgccgcccgcagaatgccgagacgaccgcgctcggcgccgcgttcctcgcagggctcgccaccgggttctggaaggacgcggaagccctgtgcgccctgcgctcttcggacgacgtgtacgagccgggcatggaggacgagcgccacgcgaagctgctggaaggctgggcccgcgccgtgaagcgcacgatgtcggacgccctgccatcctgagcggagcgccgaaggagcgaagttccgacgcaaagccagtcctttagggaaggatcccgtgcggcgccagccgtcacgtgacgaaagagaagaggaagggaacctcacatgaagatcagcattgcaagcgaccatgcgggcttcgagcagaagcaggcgctggtcggctacctggcctccaagggccacgacgtgatcgaccgcggccccgactgcgacgaccgcgtcgactatcccgactatgcggcgcgcgtggcgcacgatgtggtcgacggcatggccgagcgcggcgtgctcgtgtgcggcacgggcatcggcatggccgtggccgccaacaagatcgacgggatccgcgccgccaacgtcaccagcccgctgttcgccgccctcgcgcgcgagcacaacgacgcgaacgtcgtagccgtctcgggtcgcttcgtcgacgagtccgtgaaccgcgagatcctcgacgctttcgtctccacctccttcggcggcggtcgtcatgcaggtcgcgtcgagaagatcgccgctctcgaaaacgaatagcccgcacgcgcgcagcgcggatcgcgctgtgctagcatgatcgcttcgcctcgccctcatcgaaaggaacaccatggccctccagtacgtatcccagaccgatcccgccgtcgccgatgccatgcgccaggagcttgcgcgcgagcgcgactccgtcgagctcatcgcttcggagaacttcacgtcgtccgccgtcatggaagccgtgggcagcgtgctcacgaacaagtacgccgagggctatccccgcaagcgctactacggcggctgcgagaaggtcgacctcgtggaggacctcgcgcgcgagcgcgcctgccagctgttcggctcgaacttcgccaacgtgcagccccattgcggcgcgaacgcgaacctgggcgcgtacgaggcgctcatcgagctgggcgacacggtgctgggcatgagcctggccgagggcggccatctcacgcacggctcgccggtgaacttcagcggccgccactacgacttcgccagctacggcgtggacgcccagaccgagaccatcgactacgacgaggtggagcgtatcgccaaggaagtgcgccccaagctcatcgtgggcggcgcgagcgcgtatccgcgcgtcatcgacttcgagcgcatggccgccatcgcgcgcgaggtggatgcgtacttcatggtggacatggcccacatcgccggcctcgtggccgcaggcgcgcatcccagccccgttccgcatgccgacgtggtgacgtccaccagccacaagaccctgcgcggcccgcgcggcggcttcatcctgtccaatgacgaggacatcgccaagcgcatcgacaaggccgtgttccccggctcgcagggcggcccgctcatgcacgtcatcgccggcaaggccgtggcgttcggagaggtcatgcagcccgcctacaaggagtacatcgaccacgtggtggagaacgcgcgcacgctggggcagggcatgatggacggcggtttgcgcctcgtgtccggcggcaccgacaaccacctgtgcctcgtggacctcacgccggccgacgtcaccggcaaggatgccgaaaagctgttggagagcgtgggcctcacggtgaacaagaactccatccccaacgagccgcgcagcccgttcgtcacgagcggcatccgcgtgggcagcgctgcggccaccacgcgcggcttcacggccgacgacttctacgaggtgggccagctcatcgccgccacggtgttcaacgccgagagcgaggcgaagctcgccgatgtgcgtgcgaaggtggacgccctccttgccgcgcaccctttgtatcccgagctcgattactagtttccgaaccggatcgcaagaaagaaggcttatcccatgcactacgaccgcgtcaccgtcgtcgaccacccgatggtccagcacaagctgtccaagctgcgcaacaagaacacgtcgtcgaaggacttccgcgccctcgtgcgcgagcttgccatgttcgagggctacgaggccacgcgcgatctggcgctcgaggacgtcgaggttgaaacgcccatctgcaaggctgcgtgcaagcaggtggccggcaagaagatggtcatcgtccccatcctgcgcgcgggcctcggcatggtggaggggctgcaggagctcatgccctccacgttcgtcggccacctcggcatgtaccgcgaccccgaaacccatgagccgcacgagtactacgcgaagctccccgacagcatctcccagcgcgacgtgctggtggtggatccgatgttggccacgggcggttcggccacggcggccatccactatctgcgaaagctcggcgtgaagaacatcaagctcgtcgtgctcgtggcggcgcccgtcggcatcgaggccgtgctgtccgccgacccggacgtgcagatctacacctgcgccatcgacgaatgcctgaacgaacatgcctacatagtccccggcctcggcgacgccggcgacaggattttcggcaccaagtaacagaaaagccgcaggtaggatctccctttctgaagatcgcccgcagaatggctgttggcttgggagcggggccggtgttttcggcttggcggtttcgataaccttgaagggtgggcggcggcgcggcgcccaccaagcgagtttccccttcggggacttgctgcgcggcgccgcagcgaagcgaggactgtccgagcgactgggcgttgcgccgccgcccacccggtcgcgcaggttgaaagaggtaagcaatggaaccactcgaccatcgccccagctgggacgagtacttcatgacgctggcgaacgaagtcgccacgcgcaccacgtgcatgcgtcgcgccgtaggggccgtcatcgtgaaggaccgccgcatactggccaccggctacaacggcgtgcccaccggcatgcgccattgcgccgagaccggctgcctgcgtcagcagctcggcgtgcccagcggccagcgccacgagatctgccgcggcctgcatgccgagcagaacgccatcatccaggcggcgcgctacggcatcaacatcacgggggcgtccatctacgtcaacacgcagccgtgcatcgtctgcgccaagatgctcatcaacgccggcatcgacgagatcgtctaccagaacccgtacccggacgagctggccatgtccatgctcgaggaagccggcatgaagctgcgcgtgttcgacctgtaaacgagatagggggatgggataggggacgggtgtgtcagggggacgggtgatttgacacgccctcctgacgtaaaatgagccactagccccgtccccctatctcattcctgtccttttccgcttggagaatatacggtttcgcttaccgttcccccgcgctttatgcagttttttggccggtttattcttccactcacccaaattttgtaagtttttgtaaccctgccgtcagccgaacgtgaagttccgttatcatacgagtcggcttggtaggatgcgtacttgtgcgctcgacggtcaagaagaaagtgggacatggcagtagcaatcgttctgggggcgctcgcgggcgctgcggggttcgctccgctgttcgccggcttgcgtatgacgagacgagtgaccgacaccagcaacctggggcacgccggtgcccttcttctaggtgtgctgctctcggtcgctgtgctcttcgtaaccgccatcgcctgcgcgctcctcgcgcgcgagttcgtcctgcccttcgttcttgccgaggtcgtggctctttccgtcgcggctatcgggttcggcgtcagcaatctagtgcggaagtaagatggaaaggtaaagacacgtgaatcctcttgaatccctagcggaacaggtacctcacctgcagcattctttcgattccgccttcgtgttcgggtcgggatcgttcggcatgacgcagtacgtgctgtggatgctcatctgcttcctcatcacgctcgtcgtcgtgcttgcggccagcaagcgcctcacgatcatccccacgaacaagttcaccaacatggtggagtacggctacgagttcgtgaagaaggacatgggcgaaagcgccatcggccacggctacaagaagcacctgccgttcttggccacgctgttcttcttcatcctgatcagcaacttcgtgggcctcatccccggctgcaagacccccacggggtccatcagcatcacctgggcgctcgcggccatctcgttcatctacttcatcttctggggcatcaaggccaagggcctcggcggctacctcaagtcgttcgcgccgtcgggcctgccgctggtcatggttcccatcgtgtggttcctcgagctgttctccaccgtgctgcgcgtgctcacgctggccgttcgactctacggaaacatgttcgccggccatatggttctcggcattttcgcgctgctcaccagcgtgttcatcggctccgccatccagggcgcgggcgtcggcgtgggaagcatctccatcgcgtggatgctgttcctgttcgccatgtacgcgctcgaggtgctggttgcgttcctgcaggcctacgtgttcaccatcctcagcgcggtgtacatcggcctggccacgtccgaccactaggtcgaccccgcgccctttccgaaaggggagggcgcacgcgcctgcgcgcggcaacgtttggtgtttgaccggctattccacggctggttgacatagaaggtgtccatggttctcgggagaagcccgagaacggtaaaaggaggaaactgtggaaattacactcgctcttgcggctctgaagctcgtgggctacggcctgtcgaccatcggccccggcctgggcatcggcatcgcctgctacggctgctgcgtcgccaccgctcgccagcccgaactgcagggtcgtctgttcacgaacttcatcatcggtgctgctctcgccgaggctctgggcctcatcggcttcgtgcttaccttcatcgtgtaactaagcctcattcggataccgtgccgtataaggcttacataggaggtaacgtacgtgaaagctaaagcgaaagaaacatcggcccgcatcgggcttgccgcgcttgccggcgccggcatgacgtttgctttccctgcgctcgcgttcgcggctgaaggagagtcatcgggcggcctgagcgccatcttgcccgacatggcggagttcatccccatgctcgtgatcttcatcctgctctggatcgttctggccaagttcggttggccgaagttcgaggccatgctggagaagcgcgagatgaccatcaaggattcccttgagaagtccgagcaggctcgcgtcgaaagcgagcgcgtgcttgaggaatacaaacgccagctggaggatgccaaagcccaggccgcccagatcgtcgcagacgcgaagaagacgggcgaggccgtgaaggccgacatcaccgataaggcgcagtccgaggccaccgcgatgatcgagaaggcgcacaacgccatcgaagcggagaagaaggccgccatctccgagctgcagggctcggttgccgacctgtccatctccgttgcgtctcgcctgatcggcgaggatctcaacgatgccgagcaccgcaagatcatcgagcgctacgtgaacgaggcgggcagtttcaatgccaactaaccgccaaattctcaaagagaaggtcgcgacgtatgcgtccgtgcttctggacggcgcatacgaagcaggcggtcaagacgccgtgctcgaggtccgcgaccaggccgagcgcatcctgcgcatcgcacgttcgaacatggatctctccgacgccttggaggacagctcctatacgcccgagcagaggggtcagctggtgcgcaacctgttcgcatccagcaatcccgtcctcgtcgacgttctggccgtcatggccgagcgcgaggacttcgcgttgctgtcgcgcgtatgggccagctatggagaacagctcgaacgcaagctgaacgtcactgtcgtcgacgtcacgaccgtcgtcgaactggacgatcatctgcgcgaggtcattacgaagaaagctgaggccgacctgggaacgaacgtcgtgttgcgcgagcatatcgacaagtccctgctcggcggcatattgatgagtgccaacggcaagcgaatcgacgccagcgtcctgtcgcagttggaaagcgctcgcaacgtgctcaaactatcaacagatggaggtgaatgctagtgactgaaatcaccgcacagtctattgacgaggcactgcgcaagcagctcgatgcgctcaatacgagcgtcgaatctcgcgaagtcggaaccgtcatccagatcggcgacggtatcgcgcgcgtcgacggcctcaaggacgccatggcgggcgagctcctcgagttcgtgggttccaacggccagaccgtctacggtatggcccagaacctcgaagaggacgaagtcggcgccgtgctgcttggtgacgtcaccgcaatcaaggaaaacgaccaggtgaagaccaccggtcgtatcgtggagatcccctcgggcaaagagatgctcggccgcgtggtgaacccgctcggcatgccgatcgacggcaagggccccatcaaggccgaaggcatgcgcccggtggagttcaaggctcccggcgtcatccagcgccagcccgtcgaggagccgatgcagaccggcatcctggccatcgactcgatgatccccatcggccgcggccagcgcgagctgatcatcggcgaccgccagaccggcaagacgtccattgcggttgatgccatcatcaaccaaaagggcaaggacatgatctgcatctacgtcgccatcggccagaaggcgtccacggtcgccggcctggtggagacgctggagaagcacggcgcgatggagtacacgatcatcgtgaacgcctccgcgtccgactccgctccgctgcagtacatcgcccccatggcgggcgccgccatcggcgagtacttcatgtacaacggcgagaacggccagccggccacggccgacaacccgggccgccacgtgctgtgcatctacgacgacctgtccaagcaggccgtggcgtaccgccagatgtcgctgacgctgcgccgcccgccgggacgcgaagcgtacccgggcgacatcttctacctgcactcccgcttgctggagcgcgcggtcaagatgtccgacgagtacggcgcgggctcgctcacggcgctgcccatgatcgagacgcaggccggcgacgtgtccgcctacatcccgaccaacgtcatctccatcacggacggccagatcttcctgtccaccgacctgttcttccagggccagcgccctgcggtcaacgtcggcatctcggtgtcgcgcgtcggcggctccgcgcaggtcaaggccatgaagcaggttgccggcacgctgcgcctcgatctcgcgtcctatcgcgagctgcaggcgttcacgcagttcggcagcgacttggacaagtcgacccaggatcagctgaaccgcggcgcccacatgaccgagctgctgaagcagggtcgttacgtgccgatgcccgtcatggatcaggctatgtccatctacgcaggtgctcatggctacctcgacgacatcccggtgtccgacgtcgtccgcttccgcggcgagttcctcgacttcatccacgcttccaagccggagatcgtcgaggccctcgagaaggcgcagaagtttaccgatgaaatcgaaaccgacctgaacgccgctattgaagctttcaagctgcagttctcgccctcggcttcctaaggcaggtagactatgcccaaccttcacgacatagaaaggcgtatcggctccgtctcttcgacgaagcagatcacgcgcaccatggagatggtggcggctgcgaagatccgtcgcgctggagagcgcgtggcggctgcgacgccgtactccgaatccatggtcgaaatgttggccaacgttgccaagcgtgtaggtggctccgataacgcgctgttgcgcaagcacgacgaagtgaagaacgtgctgttcgtcgtggttgtgtcggaccgcggccttgccggcggtttcaacagcaacgtgctgcggcacgtcgagcgtctcatgaaggaaaagcaggccgcaggcgcgtccgtccaggtcgtcgcctgcggtaagaaggccgtcgggtacttcacctaccgcaaggtggagccggtgctcgggttcacggacctttctgccgatccgacggtggaggaggccgcgtccgtcgcggcgtacgccatcgacggatacgagaacggcacgatcgacgaggtgtttgtcgtgtacaaccactcgaagaacgctgccgagcaggtgctgcgcacggagctcgtgctgcccgtggacacggctgcgctcgatgccgagctggccgccgaaggcgtgcagcaggaagcgggcgaggcgaagctcgagggcgatgtgatcttcgagcccagcgccgaggccgtcctcgaccgcttgctgccggcgtatgtgcgcacgacgctgtaccatgcgctcatcgactcggctgctgccgagcagggcgcgcgccgcaacgccatgatgtcggctacggacaacgctaccgaagtgctcgaaacgttgactagattgtataaccgcgtacgccagggcgctatcacgacggagatttccgagatcgtcggtggcgcagcggctttggaggattaaatggctgaacaaatgcttacgaaggaggagctcgaggccagcaagggcgctaccggtcgcatcgtgcgtatcgtcggccctgtcgttgacgtcgaatttccccctgatcagctgccggcgatttacaacgcgctgacggttgatgccaagaccctggcgggcgacttgcacctcgtgctcgaggtcgagacgcacctgccgggcaaccttgtccgctcggtggccatgagctcgacggacggtctcgtccgcggcctcgaggtcgtcgacacgggcaacccgatcatgatgcccgtgggtcccgagaccctgggccgcatctggaacgtcatgggcgagcccgtcgacgagaagccgatgcccgaggtgaagggctacatgcccatccaccgtccggctccggactacgacgagctgtccaccaccaccgagatcttcgagaccggcatcaaggccatcgacctcgtcgagcccttcgtcaagggcggcaagacgggtctgttcggcggcgccggcgtgggcaagacggttatcatccaggagctcatcaacaacctggcccaggagcacggcggcacgtcggtgttcacgggcgtgggcgagcgtacccgcgagggtaccgacctctacctggagatgagcgactcgggcgtcatcaacaagacctgcctcgtgtacggtcagatgaacgagcctccgggagcgcgtctgcgcgtgggtctcgcgggcctcaccgaggcggagtacttccgcgatcagggccaggacgtgcttctgttcgtggacaacatcttccgcttcacgcaggccggctccgaggtgtccgctctgctgggccgcatgccctctgccgtgggttaccagccgacgctggcaaccgagatgggcgacttgcaggagcgcatcacgtcgacgtccaccggctccatcacgtccgtgcaggccgtgtacgtgcccgccgacgacctgaccgaccctgcgccggccacgacgttcacgcacctcgacgcgaagacggttctgtcccgttcgatctccgagctgggcatctacccggcagtcgacccgctggagtccacctcccgcgcgctcgacccgcagatcgtcggcgaggagcactatcgcgtggccgtgggcatccaggagcttctgcagaactacaaggacctgcaggacatcatcgccatcctcggcatggacgagctgtccgaggatcagaagaagatcgtgaaccgtgcccgcaaggcgcagcagttcttcggccagtgcttccacgtggccgagcagttcacgggcttgccgggcaagtacgtgaagcttgaggacaccatccgttccttcgccgccatcctcgacggcgagtgcgacgagatccccgagcagtgcttccgcatgaagggctccatcgaagacgtgtacgccgcgtacgaagagatgaagaaggcctcgtaatggctgggttcatgtgcgacatcgtgacgccggtggcgaagctggtctctgatgaggtcgagctcgtcgtcgtgcccggcgtcgaaggcgagatgggctttctgaaaggccatgctccgctcgtgtcggtgcttgctgacggcgaggcgcgcgtgaaggcggtcggcgcctccgagaccgtgcattacgctttgcagggcggttacgtcgaggtgacggacgacaaggtcatcatcttggccgatcgtgcgctgcctgcggccgacatcgatgtcgagcaggtgcgcgagcagctggccggcatcgaggagcagctgtccggactctccgaagaggaggctcgcaagacgacgctcgcagccgataaggcgtggtgcgacgttcagctgagggtcgccaaagcggcttaaggcggacgcgttcgaagacgcgcggcttcggtcgcttggcaacgcaacggccgatgcgctgcggttgacgagcaagatgtggaagagcccccgcacggggctcttccttttttccggctatgttttcgaggcgttggcgtcccgaagagggatggtctcggacaatgcgagaggttcggattcgagagtggtatgataagggggaaatcgttgtgcgccgacgggctgcggcgcaaagatgaaggagaacgctcgtgagtcgtcggaagtcccttgaattctccggatgcgtgcagatcgagggcgaggaagacggctatgacgcgctgacggggctgccggatcgtacgaccttggagcgacgcatcgagcggtgccttgcccagaagggtcgtccgttcagcctcatcgtcatcgatatcgacaatttcaggtcgttcaacgacgcgtacggctatgcggtgggcgacgcgatcatagcccggttcggacgctatctgcagacgagcctctcgaccggcgtcgagatggtgggacgcgtgggcagcgaggagtacctcgccatcgtcgacggcgccgaccgggacgtcctggacggcctcacgagcgatctgctctccgtgcgcctgaccatcgacggggaagggccttccggggaatccacgtccgtcagcctgaccgccggcgcgggcgtcgtgtcgtgggacggggaagctgccttgacgccggcggccctcatccatcaagccgaggtggcgctgcgcaaggcgaagcagctcggccggagccgccgctacgcgttcgagaccgacgatgcggaattcgcgcgtctgcgggaggatatgcggctttcgatggagctgtccgtcgagatcggcgatgcgctcgaacgcggggagttcgaagccttcttccagcccctgttcaggccctcgaacggccggatcgtgggggccgaagcgctcgcgcgctggcgcatccgtcgcgcggcctggtcagccccgccgtgttcatcccgccgctcgagcgcagcggcgccatcgtcgacctcgatctggccatattcgagcagtgctgccgcttcctgcgcgaccgtctcgacaagggcgcggtcatcgtgccgctgaactgcaacttctcgcgcttgcatttcttggacgactcgttcgccgacgcgttgaaaggcatcgtcgaccgctacgccgtccctccgtcgtatctgtgcgcggaaatcacggaaagcgcgttcgtcgaggatttcgacaccgtgatcggccaagtgaagcggctgcacgagcacggtttcagcgtggccatggatgatttcggcagcgggtactcgtcgctgggcatgctgcagaacctgcccatcgacgaagtgaagatcgaccagctgttcttccagcgcgacctttccgacttccgcaacgcgaccgtggtgtactcgatggcgaacatcgccaaggtgctgggcctggtcgtggtttgcgagggcatcgaaaccgccgagcaggtcgagttcgtgaaaggcatcgggtgcgacattgcccaaggcttcttcttcagccgcccggtcgacgaggcttcgttcggcggcttgctggaacgcgccctggcgcacgagccccagaagcgatcgccgctgcgcaaagaggacgcgcggtcgttcatcgtgcgcttgttcgatcatgccttcgtaaggcaggatctcgatgcgttcgcagactgttgcttcgacgacgtgcagtggcaggatcggttcgaggagggctgcttctcgggcatcgacgcggtgcgcgcgcatctcgagcgcgcgatgagcggccgggagctctccatcgcgtacaaggccatcacggtgaacgagctgtccggcgatctcgtcgcggtgagcggcgaagcggtattcaccggagacgtggactaccagggcgtcttctacttcggtgcgtcgtgtttggcaaccgatgccggcgtccttctgaccaagatgaagatcgaccgagtcaaccgttcgggtcattcgcatagatccttgcagatggcggcaatggatatggagcggttggacgaaggccccgcgctcgatcaattctacggggtcgtgcccgtgggcatcattcgctacgatttgtcgggcgacatgctgataacttatatgaatcaagctatgttcgacatcctcggctacacgaaggagcagttttacggagaggttggagccaaccttcgaatgatcgtgcatcccgacgatctcgaccatctgtacaagaagagcgtcgagatgatagagaccggcgagtcggagccgttctcctatcgtttcatcaggcgcgacggctccgtcgcacgcgtgctgtatcggcaatgcaatcttccgggcatcgacgggcggcccgtcacccagggcatgtacatcgatctggacgaagccgagcgctatctgacggagggcgaaggggaataggggagtcctgcggagccgcgatgcgagggcggccgcgtcgatcttcgcgcaatcggggatttctgtcgtctgctcgaggctaagggctcgaacgaccccagcacccgccgacacctgcttgacggcgaaatgcacgcgtcgaggtaaaaatcgaacggtttggtaatcctggcggagcccggccgcggcgcttcgagtccgccgagtgcgattgggaacgtttccccaggtcggatactcctcgaaccgtaaaacaaagcgaatcagtgtgattaccaaaccgttcgttttttaccgctcgacgccgtttccgccgtcaagcctctaccggcgcggccgcgtcccgaatcgtggtgtatcagggccatcgccggagaatcgccggcacccttgcgaggtgaatcttagccttcgtcctccttcgggtcaatggcgctccctatgatcttgcgcgccgcctcgcgggcggcgagcacctcggcctcgccgggggcctcgcgctcctgggccttccaggcgtgcgcgagcgagggcctggagatgacgcagcgcgccgaccactcctcgtcggcctcgatgagcgccgctcccaccaggcggatgagcgactcgcgcgaggggaacccctgcacgacgcgcgtcctgcgcttgatctcgcggttggccctctcctggacgttgttggtgcggatcttggtgcggtgcgtggccgggaacgccaggtaggcgagcgccgcctcctcggcctccaagagcacgtttccggccgccctcgagatcttcagcacctcctcggtcgcctcttggtagcacgcccgcacgaggacggggctcttctgcgcgaagacggccttcatggcctcgcgcgcctttctctggtcgtccttcctgtggatgcggcccgccacgttgcgcatgaggtgcgtgacgcagcgctgccaggccgctccttggaacgtctcggctatcgccttcgcgagcccttcgtgggcgtccgagacgacgaggcgcacgccgtcgacgccgcgcgccctcaggccggagaggaacgccttccacccggcgtggctctccgtgtccacgcagtccacgccgacgaagcgcttgtggcccgtgtcgtcgagcccgatcgcggtcacgacggcctgggacgccgagcgcccctccacgcggcacttcacgtaggtggcgtcgagccacaggtaggcgaagcgcaccccgtcgaagcgctgcctcctgaacgcgtccacctcggcgtccaggcactcgcacaggcgcgacacctgcgacttcgacatcgacctcacgccgagctcgcccgcgacggcctccaccttgcgcgtcgatatccccatgacgtacatctcggccaccgccgcgacgagcgcccggtccaccctgcagtagcgctcgatcaggtcctcggggaagaacgagcctcggcgcagcttcggaatcttgagggtgacgtcgcccgcggcggtcgagagcccccgctcccggtagccgttgcgcgagttgacgcgcccctcgtcgcgctccccgtagggggcgttgcacgcctcgtcggccttcgccgacatcgcggcgttcgccaggagctcgagcatcctgcgcccgaaggcctgcaggtcggtgcattcctcgaggatcgcgaacgcgagccccttcacttcggggtcgttgaatagtagagtgtccatagcgggcatcgccttccttcgaatctgtcttttgtggtgattgacgattctagacgatgtccgtttttctcgggcaggcttcgcccgccctccagaaacggattgatacaccaactttcgggacgctaccaccggcgccctgtgggagtctgacgggctcccgcagtctttcggtttgggcgcgaatcgatgcctatggcaattcctttgagtcctaccgccgcgaaggcatgcaaaacccctggtggctaaatccccctgcgccttccgggggttcgatcccgccggatattgtcatgggagtcgatttgcgcccaaggtggggaaggatgcgcgagcgctcggcgagccgtgcgaaatcgggcaggttgtgcgcgattttggcacgactcggtgcgcgcgagcgaagcggtgcgtcctacaatggatcgaatcctaaacgaaaggggttcgtatgaacgcaagaacgtggaagaagctgggcgcgtgcctgtgcgccggagcgcttgtcgccgcgctgtgcgcgggttgcgcttcgaaggtgtccgacgatgctgcgcagccgctcgtcaacggtgtgaccgatcggcaggaagtggtgtactgcctgtacttcggcctcaccgacaaagacaccggcaagcaggagctcaccatggaggaggcgaaggatatcgccatcccgctgttcatcgaggcggggtcgggctataccgtgtacgaggccgaaggaggcttcgccaaagaggacgggaccgtcgtgcagaacgacacgctcgtgttcgacagcacccacggcgacgagcaggccatcctcgaccttatcgagaaggtcaggcgggcgctcaacgtcgaaagcgtgtactgcgagtccaagctcgtcggctgccagatacgcggcggcgtcatatcgggcgtctcgtaagcggcggatcgagcgctgcgaacgccgcctgctgttgcgggcggcgttcgcgcaaaaaccatcgtttgttcgctgtttgaagacggcgctttacgacgaatgctgttagaatgtcatcgataccacgacgcgcatccatgactgacaagaggcacaagatatggcattcgtccacctgcacaaccataccgaatattccctgctcgacggccacactcatatctacgacatggtgaagagagccgccgacctcgacatgcccgcggtggccatctccgatcacggcgtgatgtcgggcgttccgcagctgtgcgagatgtgcgacaaggtggaagccgagacgggcaagcgcgtgaagcccatctacggctgcgaggtgtacttcaccaccgacgaagagctgcgcaaggacacgaagccgaagctgtaccacctgctgctgctggccaagacgaacgagggctaccacaacctggtgaagctggtcagcgagtcgcacgtggacaacttctactacaagccgcgcaccaccttcagcatgctgcagaagtacggcaagggcatcatcggctcgtcggcctgcatcgccggcatcattccgaagctgctcgacaaccgccaggtagacgaggcggtcgaatgggccaagaagttcgccagctgcttcgaaccgggcgatttctacatcgagctgcagaaccagggcatccgcaccgatgccgggttcacgcagaccgagctcaaccacatgctgaccgacgtggccaaggccgccggcctcaagaccatcgccacgaacgacttccactacctcacgcgcgaggacgcgcgcgcccaggactacatgctgtgcatcggcacgggcgcggcgttcaacgacgccaaccgcatgcgcttcgagaacgaccagttctacatgaagaccgaggaggagatgcgcgaggccctcaaggacttccccgaggcctgcgacaccacggtggaagtggccgagaaggtgaacgtggtgctggagcgcgactccatccttccgcgtttcccgttgcccgagggcgagaccgaggaaagctacttccgcaagcgcgtgcaggagggcttggtcaagcactacggcaatcccgttccgcaggaggcgcaggagcgcgccgactacgagatgggcatcatcatccagcagggcttcccggcgtacttcctcatcgtgcaggagtacatcgaatgggcgcgcagccagggcatcggcgtgggtccgggccgtggttcggccgcaggcgccatcgtggcgtacgccatggacatcactgcgctcgacccgctgtccaacggcctgctgttcgagcgattcctgtcgcccgagcgcgtggagatgcccgatatcgacgtcgacttcgagcagggccgtcgcgaagaagtgatcaaccacatcaaggacgtgtacggcgaggaccacgtgtcgcaggtcatcacgttcggcaccctgcaggccaagaacgccgtgcgcgacgccgcgcgcgtgctggactacccgtatagcaccggcgacaagatcacgaagatgatcggcgacgagctgggcatcaccatcgacaaggcgctggccacgaaccccgatctcaagaaggcctacgagaccgaagaggacgtgaaggccgtcatcgacgccgcgctgtccatcgaaggccacgtgcgcggcgagggtgtgcacgcgtgcgccaccatcatctgccgcgaccccatggccgatcacgtgcccatgaagcgcgacaccaagggcggcggcatcatcacccagtacgacggccattacacgcccgagctgggtctgctgaaaatggacttcctcggcctgcgcacgctcgacgtgctcaccatcgcgtgccgcaacatcgagcagcgcttcggcacgaaggtgattcccgaggacatccccatcgacgacgagggcgccttcaagctcatgcagtccggcaacatggacggcctgttccaggtggagggcgcgctgtacgtcagcttgttcgcgcgcctgcctcccacgcgcttctccgacatcgtcgcctcgatcgcgctcaaccgtccgggcccgctggaatccggcatggtcgaggactacatcaaggtggccagcggcaagacctccatccactactacgacgagcgcctccgccccatcctggaggagacgtacggcaccatggtctaccaagagcagatcatgcagatatccatggctatgagcggtttctcggcgggcaaggccgacaagctgcgcaaggctatgggcaagaagaagctcgacgttatgcgcgcgttgcaggaagactggaacaccggcgcggtggagaacggctatccgctggaaattgcgaagcagatctgggaagacgcggagaaattcgctaagtacgcgttcaacaaatcgcactcggccgcctacgccatcctggtcatgcgcacggcgtacctgaaggcgcactacccgaacgacttcatggcggccgtgctgtcgtcctacatgggcaacaccgaccgtttgatccgctacatcgcaagctgcaaccactcgggcattcccgtgttgccgccggacatcaattcgtccaacgccgagttcacgcccaccgacgagggcgtgcgcttcggcctggtgggcgtgcgcggcgtgggcgcgaacgtggccgaggccatcatcgaggagcgcgaggcgaacgggccgttcacgtcgctgcacgacttcgtgaaccgcctggacgcgaaatgctacaaccgcaagacgctggaagcgctcatcaagggcggggcgttcgactcgacgggctacacgcgcaagcagctcatgtacttcgttgacgagacgccgctgctggaaagcgcctcgaagcgccagaaggatcgtgagagcggccaggtgtcgatgttcgacctgttcggcgacgatcccgattcgggcttcgaggaggaggttccggaaccggacggcgtggagtggccgaagcgccagctgttgacgttcgagaaggagatcatgaagatctacgtctcggaccacccgctgcgcccgtacgagggcaccatcgcgcgtatgaccaagttctcgctgggagacctggccgagcgcacgaaggagatcaagtccgcggtgttcgtgggcatgatctcgaacgtggtgacgaagctgacgaagcgcggcacgaagatggccacgttcaccttggaggatacgacgggccacgtggagtgcatctgcttcaagtacgacgacaacgccgaggccatccaggaagacgccatcgtgaaggtgaagggcaagttcgaggcgaacgaccgcggcaatcagatcatggcgttcgaggtggaggtcatcgagctgaacgaggccgatgcgcgtccgtcgcaccttgagctgaaagttgcgtcctcggacttcgaccagtcgaagtcgctgcggctcaaccgcatcttgaagtcgtatccgggtcgcgacggcgtggttctgctcgtgcagcagagcgatggccgcaagttccgcgccgaactgcccgtgtcggtggattcccgcagccccgtcatgcgttccgagatccaggatctgttcggttcgcaggtgtggagggcttcttgatgctccgtcgttctcgaacgacggagctcctcgacgctgcgaagcgctggggcgccctatctcgcggcgatgccgatggctcgcgtacgtagcgtcgtatcgcgcattgcccagtcgctcaaacagtcctgctcgctcgaaggccccgctggggccttcggctcgtgcggaactcgcttggtgggcaacgcgcgatacgacgtagcttcgcggcgcttttaaacaatttggcaagcggatagcgccccctcttcgcagagggggcgtgttcgtttatgatgtcggctatgaatacgcaaaccatcaccccaaacaccgcgcgtaagcgcgaagcagcggccgctgcggcagctgataaacccgtgcgcgaccatactctggcgttgaccttgtcgtacaacggcgcgccgttcagcggcttcgctcgtcagccgggtcagaccaccgtgcagggcgacctcgaggatgccctgcgcatgctgttccgccgcgacgtggaaaccacgtgcgcgggacggaccgatgcgggcgtgcatgcgctcggccaggtggtcagcttcgacgtggacgaccgcgacatcgcaggacgctcgctgcccagcttgcgccgttctctcaacgcgctcacgcatgacgccatcaccgtgcgcgaggtcgaaccgaagaagctgggcttctcggcgcgcttcgacgcgcaggcgcgcgagtatcactaccacctgtgcgtggacagcacgtgccccatcttcatgaaggacttctcgtggttcgtccccggcggcctcgatatcacggctatggaagcaggtgcgcagtatctgctgggcgagcacgatttcaagagcttctgcatggccgcctcggcggaaggcaagcccacgcaccgcaacgtgcgcgagatttccttccatcccgagacggtgatgggcgagaacctcatgtccatcaaggtggtgggcaacgcgtttctgcactccatggtgcgcaccatcgtgggcacgctggtgatggtggggaagggccagcgtgacgccgattgggtgggcgaggtgctggaggcgtgcgatcgtcgggttgcgggggagaacgccccagctcaagggcttgtattctggcgagtcatctactgacgtgctacaataggcctccgataaaccgaaggcggcgtatcatgttcagcacatcaacggcaaagcgcgtggcgcgcgaggcggaaaagatcgtatcgctcaaagaggatatggacgccgtctcgtggacgcgcgtgctcgaaataggcaatcagctccaagagggcgtcgacgaggccgagcgcgtctcgctggcgtgcgagctcgtgtccatcgcccaatccaaccgctcgctgtacacgcgcttgggcctcgatccggaaccctcgtcctcgcgcgtgatggcgtcgggtatcgaagtgatggagggcgggcttgccgaggccgccatcgaaaagcggggagatcgagggggacggcgccctccgatcgtcgaggctccgtcgatcgagccggaggttttcgtggaagagccgagcgaagccgatttccaggttgccggcgtgcaggcggaatgcgatctcgtggcgaagaacgatcccgacgaaagcgacttcatcgaggcggccgaagccgtggcgcgcgtcgattcgcagtccgctcctttgcccgtcgatcccgagcccgtcgatcctgcgcccgttgccgagcctgccgcgcaggtcgaggcgacgaagccggaagaaccctcctcgacgcagccgcagcaggagccgcgaccagagccggagccgaagccggagtccgtggctgcgcccaaagagaagccgcctcggcagcgccgtttcgcgcgttttcgcaacctgtacgaaagccgcgacggcggtctgtgcgtcttcgaggacgagcacggccacctcgtggccgtcgactcgtcgaagctcgcctagcgaacgcgaagggccccgtagggcccttcgttcgtttacgccgccggtttcttggggacggtcttgtccacgaagtagatcttgtaccacatgaggaacatgtagacgatccagatcttgcgcgagcggtcgatcttgtacctgtgctcgtcgagcaggcgcaccagctcgtcggtgttgaagaactgttgcgcgatgtcgccggtgaaccattccttgacctggttgtagtagcggtcctggcgcagccagtccaccatgggcacgggaaagcccagcttctccttctgcgcccagtctttcgggatggtgcgctcggccgcctcgcgcagggcgatcttcgtctgctcgccgttcgctttgaacggggtggggatggtgcgcgagacgttgaacacctccttgtcgaggaacggcacgcggctttccagcgagtgggccatcgacatcttgtcggttttcagcaggatgtcgcccaccagccagaagaagaggtcgacgtactgcatgcgcgtcgtctcatcgaggtcggacacctccgcgtacgcaggcgcgatcagctcttgcggcgagcacgcctgcacggggcgcttcagcaggcgggcgcgctcctcggggctgaacgccacgccgttggcgttggtgtagtaccagtcctcgggggtctcgctcgcgcgctccaggtagttcgcgccgcgcacgcccagcgcgcgagccgccttcgacgcgccgcgcagcaggcccttcggcacccaggacagcttcgcgttggcgaacggcgtctggtagatgcggtagccgccgaagaactcgtcggcgccctcgccggacagcacggccttcaccttcttcgcggcctcctggtcgacgaagtacagcgccacggcgctcgggtcggcggacggctcgtccatgtgccactgcacgcggggcaggctttcccagtactcctcttcgccgatgtgcttggagttgttctcgatatgcagttcgtcggccagctcgcgcgcccaggagatctcgtcgcgctcgccctcgtactcggcgaagcccacggtgaacgtcttgatgtcgggattctccttcgccaggcatgcggccatgtagctggaatcgatgccggacgacaagaacgagcccacctccacgtcggccacgttgtggtagcgcacgctttcgcgcatggcggcgtcgatggccttcacggtgtcctcgcggctgcggttctggtcgaagtcgtacgtggggcgccagtagcgctcggtttccgtcgtgccgtcggcgcgcacggtcatgcagtgtgcgggctcgagcttgtagatgcccttgaagaacgtctcgggcagcgccgagaactggaagcacaggtactgctccagcgcctcctcgttgagctcgcgttcgtaggcggggtgctccaggatgcatttgatctcggaggcgaagatgaactgcgagccggcctcgccgttctgcacggtgtagtaaaacggtttgatgccgaagaagtcgcgcgcgcagaacagctcgccgcgctgcttgtcccagatggcgaacgcgaacatgccgcgcaccttgtccaacagcagcttgccccaggccaggtacgacaccagcagcgtctcggtgtcggactcggtcttgaacgtccagccgtccgcggccagctcgtcgcgcaggtcgcggtagttgtagatctcgccgttgaacacgatggcgtagtcgccgatggtgaacgatccgggggcggagccttccgtagccggcgacgtcacgatggagtcatgcgcgcccgtggcgcgcaccatgggctggctgccgttctcgaggtcgatgagcgacaggcgccgatgccccagcgccacgccgtcggcaaggtactggccctcgccgtcggggccgcggtgcgccatgatgtcgcacatggccttcaacgtgggcgcgtcggcttcggtcgcgccggtgaatccgcagataccgcacatgaatgattctccttctcgtttggtctgcgcaccatgatagcccaagcgccccgcaacccccaagcgccctgcccgccccctcgccaaaaccgcagatttggagggagctggcagcgagtagtcaccgtaggaacgcatcttcgcccgtaaaacacgcctcgtgcgctgtggcgtgttttacgggcgaagatgcgcaactgggttttggcgcacggtcgggtctgccgctactgctcggcgttggctgcgtcgtagacgcgctcgccgcggaagtaggtttgaaggaccttcgcgttcttgatatcgagggggttcgcatccaggatgttcttgtccaccacgatgaagtcggccgacttaccctcttcgaggctgcccgtctcgtctcccatttccagggcccaggcggcgtcggcggtgaagctgcggatcatgcggcgcacgtccacgcgctgatcgggccacagcaggtaggtcgggtcgtccgcgtccgagatgtcggcgatgccgaactccccgccgttcacgaggttgcgcgtcacgccggcctggatgccctcgaaggggttcgggtttgcggtgacggggtagtcggaggctgaaaccaggacggcgccctcgtcggcgaacgccttcatgggatacatcttctcagctcgctctcccaacgccgtcttctccttcggctcccaatactggggcgttttgacgaaccagtacgggtcggccacggccgtcacgttcagttcggcgaagcggggcacgtcgtcgtccgataccagctgcaggtgggtgatggcgttgcgctcgcgatcgtcggggatgctgcgttcggcgtgctcgatggcgttaagcgccatgcgcacgccgccgtcgccgatggcatggaggtgcgccaagagccccctgcggttcacggactcgacggccttgtcgagggcgtcctgctgccagcccgcttcgccgtggtagccggggacatcggaatacggctccagcagcagcgccgattcgttgtccatgacgccgtcggtgaagaacttcgcggctgtgatcttgaacaggtcgccgtcgtgctcggccttcagcttgtccagcttctgcaggtcgtcgtcggtctgccagctggtcacgatgcccgcgccgcgcacgcgcatggtcagctcgtcccggtcggcaagcttctggtacgcgtccgccggcaggggtaggaagccgttgcccgggggcgagaagatggccgtgtagcccaagctgttgaggtgtgccaggtaaccgctcagcgcttggggaaggttctcctggccgaaggggtagtcggctgcaagcgacatggcggaatcggcgaggatcccccacagctcgccgttgtcgtccttcacgattttgccgccgggcgtgggctcggtgtctttcgtgatgcccaggaactcgaacgccttcgagttcagccaggcgccgtggccgtcgaacgagtacacgaggatgggcttatcggggctgatggcgtcgagacgctccttcttgggcccgcgttccagttcctcgtcggggaagagggccgccgcgtagccgaagcccgaataagtttccttgtcggggtgggagtcgacgtagtccttgatggttttcagcatgtcgtcggaactggtcttcccgacgagcatgaagtcgaagaagtcgggcgagacggagtggatgtgcacgtcgatcatgccgggcagcacgaacttcccctgcaggtccaccacgttctcggcggcatttttgtaggggcggccgttgtcggcgtcgccaacgtagatgatcttgccgtctcgtacggccagcgcttcggccatgcggtcgttcgcgtcgacggtgtagacggtgccgttctcgtaataggtgtccgttgcatggtcggctccttcttcggtaccgggcccggcggagccgtccgatagagaggtggagcagccgagcaggtcgaggccggccatggcgacgaacgcggcgcttcccgccatgaaggcgcggcgggacaggcaagcaagtgcgggcatagcggtttctccgttcgacgaggggtgaagggtgcttttgcatcgaagtatcgacgaggggctgccctgcaaagaggggaggcgcttgcggtcgcaggagggttgcgcattcgtcgcccgcacgtttacagccttgcgttcgctggccggcggtgcgcgcgtcggaggacgcttccgtagcacctctccgggcgtcggttgctggcaaaacggatctttcggcaaaacgttgttggcgaccagggttttcccggtataatgatgcatctggatcgcggcgcaggtgcacgacgtggatgggcgcccatatccgatcctttgcggacgcgttccgcgagcggattttccggggaataccaactgaacgttaacggaggttttcgatggcttcaacgcatgcgcacgcgcgctcggcctggtcgggcaagtgggcgttcattctggctgcggcggcatccgccgtgggcttggggaacatgtggcgcttcccctatctggcggccaagtacggcggcggcacgttcctgctcacctacctggtgctggtgttcacgttcggcgtatcgctgctgttgctggagacggcgctcggccgcaagacgggccagtcggccatcggcgcgttcaagcagttcggcaagaagtacgccttcatcggcatcctggcgtccaccgtgcccttcatcatcacgccgtactactgcatcatcggcggctgggtgacgaagtacgcggcggcctacctgatcaacggcccggaggcgctggctgacggcggagacttcttcacgggcttcatctccagcaacaccgagagcttcctgtggatgctcctgttcatggccatcgtgttcatcgtggtgtcgctgggcgtgaagggtggcatcgagaaggcgaacctcgtcatgatgccggcgctcatcatcatggccgtaggcatcgcgctgtacacgctgaccatgcccggcgccgtcgacggtgccctgtactacctcacgcccgacttcagcaagttctcgccggagctggtcatcggcgcgctcgggcagatgttctacagcctgtcgctggccatgggcatcatgatcacgtacggctcctacctggacaagaagtccagcctcacgcagagcgtcgcccgcatcggcggcttcgacatcggcgtgtcgttcctcgccggcctcatgatcgtgccggccgcgttcgtggccatgggctcgggcgaggccgtggcggccaactccggtccgtcgctcatgttcgtcatcctgcccaccgtgttcgccgatatgggcggcgcggccaccgtcgtgggcttcctgttcttcctgctggtactgttcgcagctttgaccagcgccatttcgctgaccgaaacctgcacctccatcgtgcaggacggtgcgggctggtcgcgcaaaaaggcgctgtgcgccgtcatcggcgtggtcacggtggccggcatcttcgtgaacctgggctacaacggcttgtcgttcatcgagccgatgggcgagggcagcacgctgctcgacttcttcgacttcatctccaactcggtgatcatgcccatcgtggcgctgctcacctgcatcttcgtcggctggatcatcaagccgaaggccatcgtcgacgaggtgaagatctcgagcgagttcaaggtggagaaagcctggaccgtcatcatcaagtacgtggcgccggtgctcgtggtggtcatcctcgtggcgttcgtcgcgcagacgttcgggctcatcagcttctagcgttcaggcgcatacgaggcattcgcgcggagcgcccttcggggcgctccgtttcgtttcgggcgcgagcggcgcggatggggctcgtgcttcgtgtgcgttccggttgcgtcccggtcgtgccccggccgccggcccggtcgcctggccgcgtccgcgcccggcttcgctgtctggtccgctgccccggtcgcgtcgtcccgctcagccgcgtccctcgcctggccgcgcctggtcgtcccgcccgtgccatcgtcgtccgcctgtgtcgtcctgcccagccgtgccctggccgcgccgcttcggccggatgcgtgttttcgcaaggccatgtgcagaaaaaacgtcgttttggcacggccggctcgctcaggcgcggcattccgaggcgatggcggagcgcgacctggggtttcgcttcggcatccttcgggaagatgcgtcgagggatgccgagtagtgccaaaccgttgattttgccgcatatcggatccggttttcgttcgggcgcgatcccgctccaagcggcgttacggcggcagcgatcggttttcgcagggatgttgcgttcggttcggaccgtccggctcccaacctcgcgcgacctggtgtaacgtcgcgggttgcgcgtcttggggcgcggaggcatccaagtgcgctcgaagtgcaacatcgcgggcaaaaccgtgcaacggacgcgctgaacggttttgcgccgatagatggcatgacggcggaagcgaagtcgaacggcggaaatcgaacggtttggtaatctcgacgagggctcggtcgcggcatctcggacccgcagagcgcgatcgaaggagttttcccaggtcggatgttcgaagcgtaaacaaaagcgaatcgataggattaccaaaccgcccgattgctgccacggagcggggatttcgccgtcaaatcggcattgacgggtgctgacgcatgtcgccgtgcaggtagggcggcatgctgtcggtcaagacggcgcgcttcgagtgctccgcatgaaaaagataccgaagcgtcggagaatgcgaggggaggccgcgcagagcgcaggtagtttgctatcatgggacgacacatctgcatcgtatgagaaggaagttccatgtcgctatccatcggtatcgtcggtctgccgaacgtcggcaagtccacgctgttcacggccctcacgaacaagggcggccttgcggccaactacccgttcgccaccatcgagcccaacgtgggcgtggtgcccgtgcccgacgcgcgcctggacgcgctggcgaacatcgaccatcccacgcgcatcgtgcccgccaccatcgagttcgtggacatcgcgggcctcgtggccggcgccagccagggcgagggcctgggcaaccagttcctcgcgaacatccgcgagacggacgccatctgcgaagtcgtgcgtttcttcggtgaccccgacgtggtgcacgtggcgggccgggtggacccgagcagcgacgtggacaccatcaagaccgagctcatgctggccgacatggccaccatcgagaaggccctgccgcgcttggaaaaagaggcgaagcgcgacaaggacggcgccaagaaggtcgaggtggcgaagaaggtgctcgcgggcctggacgaggggcaccgcgcccgcacgttggggctggacgaggacgagcaggctgccatttacgatctgcacctgctgacgatgaagcccatgctgtacatcgccaacgtggacgaggaccagttggacgccgatctgcccgagatcgacggctgccgccccgtgcccatcagcgcgaaggtggaggccgacctggccgagctcgatcctgccgaggcgaaggagtacctggaggccatgggtctcgaagagagcggcctggcgcgcctggtgcgcgaggcgtataaacttctggggctgcagtcgtacttcaccaccggcgaacaggaaacgcgcgcttggaccatccccgtcggtgcgaaggctccgcaggcggcgggcgtcatccacaccgatttcgagcgcggcttcatcaaggcggagacggcctcgtacgaagactacgtggggctgggcggcgagaagggctgccgcgatgccggcaagcttcgtcaggaaggcaaggagtacgtcgtccaggacggcgacgtcatgcacttcaagttcaacgtgtaaggaattcgtcccgaaccccctttgaacagggggttcggtttttaacggaaacgtctaatgcatgccggggtatacggctccggtggcgggcgcgggcgcgtcggcgtcgtcggacgggatcacgccgaactcggccagcagcccgtagaggtcggtgcccttgagcttctcgattccctcgtgcagggcgagcttttcgaggggattcatctccatgtcggtgatgggcttgccgtccctgatcagcgtggtggcgttcagcaaatcgcggatgtcgaacgcgctgccccatacttcgggcacgccgcggtcgacgttgcacagcgtgtagacggcttccatgccggtgcgcatggaatactcggtggtgaaaatggtgtcgcgcggcgtttccgcgaattggccgatgaacgcgaagttcaccgcgccttcgggcacgacgtcgggtcggtcgcctgcggcgcgcggcatgaagaatgccgtgatgtagggcatcatgcacggaaccgtgttggcgctgttctcggcgagctcctcgatctgcgattcgggaacgcccaggtggtacagccactccatgcatatttccttgccggtgcattcgcgcagggttttcttcacgtagttgccgggcacatcggtgaacaggccgtatatccagccgcacagctgatcgccgggctgggctctgaactggggttgcctgttgaacgtccaacttaaaagccagttcgaatcttttacggtaacgatgccgccggttacgacgccgcccgagaacggatcgcgacggcaaatgctctcgatatagggaacgatcttctcatcgagcgtcgtgacggtggcgctcatccagttggacttctccggatcgccgatgaatttttccggattcccgaatgcggaatcctgccgtgcgatacgtcgccacaggtcgaatccggttcctttttccagcacggcgttgaactgggccggctcgtcttgcgatccgaaggacgaattggcgacgcagctgccgttggtgatgaacagcaggtcgtcgtcggtgaggtgaaacgtcttgtcggccccttcgcatatcgtctgcacctcggtggctactttgcgctccggggtgctggagaacgtgatgtcgacgacctcggtgttcagatggatctgcacgccctggcctttcaggtagttcaccatgggcaggatgagggattcgaactggttgtaccgggtgaagcgcagtgcgctgaagtcggggagcccgccgacgtggtggacgaaacgctggatgtagcgcttcatctcgagcgcgctgtgccagctctcgaaggcgaacatggtgcgccagtacagccagaagttggaatcgagcacatcgtcggaaaaatagtcggttatgggcttgtcgtcgagttgctcttcgggggtgaagaacaggttcatgatctccatgcacgccttgtcggacaggttgaatgtattgtcgaggccggcgtcttcaccccggttgaccgttgcgcggcacagggaataattgggatcgcgcttgttcaattgatagtagtaatcgaggatgctcatgttctcgtcctcgatggaggggatggatcggaacaggtcccacatcacttcgaagtggttgtccatctcgcgaccgccgcgcatagtgaagccgagctggggatactcccacccgtcgcaggcgccgcccggttcggcgtcgcgttcgaacaggtgcacgcgcgagccgtccatctgagcatccctgatcaggtagcacgcggccgacaagcccgccagcccggtgccgacgatgtaggccgatttgtcctcgatgccctccggctttgccgggcgggcgaatgcttcgtagtttccgctggaatagtacacaggctctccaatctctcgacgtaggggtacggcccccattgtgatgcggggcgtccgagggcgaagagggcgtaccgacctgatgcggcttcgtttggaaggggtaacgtgggggttcgggttgtcgcatgccgcggtgtcgaagaacccagaacggcttgcattgcgttcggcgtcggcttcgtagctttgttgccgctcgaacgattgcggccggcttgttttccgtttgtgtatactgatcacgaacaatgcgctgaagcgtgtcggatggttcgagcggccgcgcgtgtcgagcgcgatcgggtgagcatggtcggggagcgaggattatctatggacgagatcgggaagctgggcttcgggttcatgaggctgcccgtcgtcgagggcgacggcggcaaggagatcgacatcgagcaggtcaagcatatggtagacctgttcatggacgcgggcttcacctatttcgacacggcgcgcggctaccataacggccggtcggaggcggcgctgcgcgaggccgtcgtcgagcgctatccgcgcgaatcgttccaggttgccacgaagctgccggcgtggctggcgaaaaacgccgatcatgcgcgcgccatgttcgacaagtcgctgcgcgagacgggggcgggttatttcgacttcttcttgctgcataacctgggcgaggagcgcacgcgcctgttcgacgacttcggcctgtgggacttcctgcacgagaagaaggaggcgggtctgatccgcaacctgggcttctccatccacgacaaggctgccgtgttggaagaggtgctggaggcgcatcccgaggtggacttcgtgcagctgcagatcaattacgccgactgggagagagaaaccgtcgaatcgcgcaagtgctacgaggctgcgcgcgcccacgggctgcctgtcgtggtgatggagcccgttaagggcggctcgctcgtgcatctgcccgaggaggcggcggacgtgctgcgcgccgtgaatccggacgagtcgctgccctcgtgggcgctgcggttcgccgcgtcgctgccgggcgtgctcaccgtgctgtcgggtatgtccacacccgatcaggtgcgcgataacacgcagatcatgcgttcgttccatccgctggcgcacgaggaggacgaggcgctggcgcgcgtgcgggccatcctcgacggcgtgcctaccgtgccgtgtaccgactgccgctactgtttgaagaactgcccgaagggcgtgcgcatcccggcggccctcgcgtcgctcaacatcctagagctgttccacgacatgcaccgggcgcaggagaactacgattggaacgcgtcgagcggccccgcgtccacgtgcgtcgggtgcggcgcgtgcgaaagcgtgtgcccgcagcatatcgagatcgtgaaggagctgggtcgcgccgccgagctgttcgagaagaagccggcatgacgctgacgggttccggccaggacgtgggcgtcgaggcgctcgacgcgtttttcgcgcgcacgccgcgcttggccgtggcgttctcgggcgggtgcgactcttcgttcctgctggccgccgcgttgcgcgccggatgcgacgtgagagcgtacggcgtgcgtacggcgttccagcccgccttcgagatcgaggacgcgcagcgcctcgccgccgagctgggggcggacttcgagctggtcgacgccgacgtgctggcgcagggcgagatctgcgcgaacgggcccgataggtgctaccgctgcaagacgttcatcttctccaccatcctcgcgcgcatggccgaggacggcttcgaggtgctggccgacggcacgaacgtcacggacgatccggcgaaccgccccggcttccaggcgctcgccgagctgggcgtggtgtcgccgctgcgtcgcgcgggcatgacgaaagacgacgtgcgcgccgcgtcgcgcgagctgggcttgttcacggccgacaagcccagcttctcgtgcatcgccgtgcacgtgggagaggggcggccgatcacggcggcggcgctcgctgagacggccgagcgcctgggcgtggccgacgggaggcgcccgtgagcgcgggtcggcctgccgggcgcttcgtcctcgagaccgagcggctgctgcttcgcgagatgggccagagcgacctcgccgcgctttgcgctatccttcaggatgacgagaccatgtacgcctacgagggcgcgctgtcagacgacgaggcgcaggcatggcttgatcgccagatggagcgctatgcgcgcgacggcttcggattgtgggcggtcgtgctcaaggaaacgggcgccatgatcggtcaatgtgggctcacctatcaggatgcagacggcgtgcgcgtcgtggaagtgggctacctgtttcggcggtcgttttggcatcgcgggtacgcgacggaggcggcgcgggtgtgtcgagattatgcgttcgaccaggtgggcgtcgatacagtgtattccattattcgcgacacgaacatcccctctcaaaaggtggcgctccgcaacggtatgaagccggagggttcgtttgtgaagcgctatcgtgacgtggacatgccgcatatcgtttatgccgtttcgcgcgcggttcgcgacggcgtatactgagagatgcgcgacgcgccgcttcggcgagcgcggcggcgcctttgccccaaccgaaaggaacgccatgacctcctacgttttcacccatgcgaccgtgctcgacggcaccgagggcatggagccgcagcccaacatgaccgtcgtggtgaacgagggcgtcatcgagaaggtgggccccgccgcctctaccgtggggccgttgggcgcgcgcgagatcgatctggcgggagcgtatctggcgccgggcctggtgaacctgcacgtgcacctgtgcggctcgggcaagcccacgagcgccggcgccgcaggcgacctcatcgacaaggtggtgggtaacccgctgggcaggtggtacctgcgccgcacgatcagggcgcacgcgcagcagcagctggccagcggcgtgaccacggtgcgctcggtgggcgatcctgggttcgccgacgtggacgtgcgcgatgccatcaacgcggggaagcatccgggtccgcggctggtcacgtccggtgtgggggtcacggtgcccggcggccacggggcgggtttgttcgcgcatgtcgcgtccacgccggaagaggcgcgcgccatcgtgcgcgactgcttctcgcacaagtgcgacctggtgaagctgttcgtcacgggaggcgtgttcgacgccgaggtggagggcgagccgggcgtgctgcgcatgtcgcccgaggtcgcgcaggcggcttgcgacgaggcacgcaagctgggcctgcgcaccgccgcgcacatcgaaagcgccgagggcgtgcgcgtgggcctcgaggccggcgtggacaccatcgagcacggcgccccgctggacgacgagctgatcgcgctgttcaagcgcaacggagccgggcgcgcctcgtcgctgacctgcaccgtctcgcccgcgcttccgttcgtggagctcgatcccgccaaaacgcattccaccgaggtgcagaaggtgaacggccgcatcgtgttcgagggcatcgtgcaggcggcgaagcaggcgctggcggcggggatccccgtaggtttgggaaccgattcgtcgtgcccctacatcacccagtacgacatgtggcgcgaggtggtgtacttcgagcgcatcgtgggcgcgtcgcgtcagatggcgctgcatacggccacgctgggcaacgcgcgcatcctggggctgggcgacgagacgggctccgtcgaggcgggcaaggcggccgacctcatcgtgctcgaccgcaaccccctggagaacctggaggcgcttcgcgacgtgcgcatggtcatggctcgcggcgtgctggacgagcatcctcgcgtgaagcgccttgccgaactggacgccgagctcgacggcttcctgccgggtaaccaaaagcattgactcttgtcacgtgacgcgttacaattctgccatgattaaaacgtttgccgataaagacacggagcggctgttcaccgacggttcgtgcaagcgcatttcgtcggacgtggctgcgcgcacggcgcgcaagctcgatatgatcgatgcggcgctcacgcttgaagacttgcgggttccgcccggtaacaggctgcatgccctcaaaggagatcgggcgggaatgcacgcgatttcggtgaacgaccagtggcggctttgctttcgcttcgagggccagcatgcgtacgatgtcgcgttgtgcgactaccattgaggcaggtgggaagatggagcagcatatgatattgatggcgcgcaagcccacgcatccgggcgaggtcctgcgcgaagagttcatgcccgattacgggttgacggttgcatcgcttgcgaagcgtttgggtgtgtcgcgccagtcggtgaacgaagtggtgcgcgagcggcgcgcggtgagcaccgagatggcgatgcggcttagccgcctgttcggcacgtcggccgagtattggctcaacctgcagcgcaacgtggatctgtgggagtcgctcgacttgcaccgcgaagaactcgacgccatagaagctttgatcgcgtagctcagtaccggttgcatgacccgtgcgctccctcttggcgggcgaggtcggcgaggagggtttcgaagccttgctgctggtcggtgagctcgcagcttgccagcaggtcgcgggcgctttcgagggtggcggcgccggcatggggcgagcggtgcagcgccatgccgcactcgatgacggcggcggcgaacgtccaatctccgttcggatcgtcggtgcagctctcatcgtcgaccaccagcgcctgctccaccgcttcgacggttcccgcagggcggtagcgcatcgtgcacgtcagccattctccgccgttcgcttcggagcggcgaccgtcctgccggtcgtcggcatcgcttccgtatttcgatgcggacgcgcccacctcgaacgccgatcctgcggggacgatctcgtacgccacggtgaacgcatggcccgcgcccacctcgcccgcatcgtcgcggaactcctcgtcggcgagcgcgcggttctcgtagccgatcagccgatagcccttcacccggtcaggattgaattccacctggatcttcacatcgtcggcaagcggcacgaggttcgcacggaggttccggccgagcacccgtcgggcttcttcggcgcagtcgatgtagtggtaggcgccgttgccgtggtcggccagcgtctccatcttgttgtccttgtagttgcccgagccgaatcccagcaccgagaggtacacgccggtctcgcgcttctgctcgacgaagtcgtgcagctcgctctcggacgagatgcccacgttgaggtcgccgtccgacgccatgacgacgcggttcacaccgccttcgatgaacgacgattccgccaggcggtacgcctgctccaaaccggcttccccgttcgtcgacccttcggcgacgaggctgtcgacggcgcgcatgatacgccgcttgtcgtcgcccggcacgccttcgagcagcacgcgctcgccgctggcgtaggttacgacggacacgcggtcgcgctccgtcagcccttcgacgagcgcggcgaacgagtctttgaccagggggagcttgtcagggtcgtccatcgaccccgagacgtcgatgaggaatacgaggttggcgcccgtgggcgaagcgtcgccgtccttctcggtggcgaatcccatgaccagcagcttcgtctggtcgttccaaggacagtcgctcatctgggccgatacgccgaacaagtcggagccaacgggctccgggtaggcgtagtcgaagtagttgagcagctcttcggtgcgtacggcgccggcgggcacgacggccggcgcgtatctctgcgccaccatgcggcgcaggttgcagtacgaggccgtgtcgacgtcggccgacagcgtggacagcgggctggtcgcaggggagaggaaccccggctcgtcgagtgcacggtattcctcggtgccgccgggagagggcgagggaacgtacggatagggaggagggcatgtggaggccgtctcggacagcgcggaaccgatggccatgatctccgattcgcttgcagccgatcctagctggtcgcccgcctgaccgtcggggctgcatccggcaagcgatgcgccggcgatcaggacggcgaaggcgatggagcccgcggcgagcctgccgcggctgcggttggaagcgtgcatgatgttctccgttcgtcgggcttacgcggggtcggccaggtacgtgacgccgttttcgtcgtatcggatggcgtaagggtgggccgggtcgctcgtcgcgaacaccgtgcacggcgaggatgacgtttcgtcggggccggtggcgacggcgcgctccaattcttctccgacggtttcggggctggcaggcagggggccgtcgtcgccgagggcgacgcgcagaagctcgcccgaggagagcgtgacgaacggatagcgcgcatcgccgtcggacggcgcggctcccgattcgctttgcgattcgtcggaagcggccggggcagcggatttaagctcgtcgttgatgctggtcagcgccgccatgccgctggagcttgggggttgcggcaaggaggaggcgtaggtgaacacgccgatgcccgcagcaagcgcgaggcaggcggcgaggggaaccagcgcgcggcgagccgtccggcgcttcggagcgcgccgctcgcttgcggccagcagctccgccagcatgcgccgccgggcctcttcgtcggggcccatgctctcgtaggcgtccgccagacgcttctcaagcgattcttccgcgtggaaacggttatcgtccatgtcgctcacctcccaacatcgtcttcaaaagcgctcgcgcctcgctcaggtggctgcgcacggtcgaggcgggcacgccggtcaaggccgctatctcggccgtgcgatacccctcgtaatagaacaggtacacgcaggtcttgtacttctccggcaaggccagcaccgcatccagcgtctcgtcccgctgcgcgcgcctctcgtccgcgatgtcttcgggaaggacggcctgccgcgtgcggtgcgcgctcttcagcacgtcgcggcaatggttctgggcgcatacgatgagccatgccttctcgtgctccgcgtcgttgaaccggcgcgggcgggcgatcagcttcatgaacacgctctgcgtcgcgtcctccgcgtcggccgcgctgcccagaaacgagtagcacagcctatacaccgtcgcggcgtggcggttgaacagtgcggctatgtcgacgttgttctgcagcggttttccctttctgactgcaacacgatcgaacggcgggttttgtcggagaaatttggagaatattgtagcggaaggcgatgtttcgctccgcaagcctgcgaaaccttgcgcgcagcccgcgcggatcttgcgcgattccagcgcggatcgaacgcggatatcacgcgcggcacacgtcgatccagcgcggatcacacgcggatcacgcgtggatccagcgcgaatctaacgtcaaaaatattgtttgatctggggaaacttttacttcacagaaggcgtgcgaggcactagaatcatggctgtcagcagtgttcgtttccggcgggtggcgccttcgagagggggtgattgcccaatggatagtttcaatctgatcgcaggactatgttccatcctgtcattcttcatggcagcctacgactgggcgcgacgaaagcggaaggcgtcgaggaaacagaaaggacggcgggagtcctagtccctaaccgtccctgaaacataccggcgtcacccgtccggagctcacgatccacgggcaccgctgacaacctgcattatacatgcttcccgccgtcgcgcaagacgtgttcgcggaacaatgcagtatcatgggaatacgagagcaagccggaaacgggcggggaggaagcagcagtgacggatctatcgcaggcgcgccaggcgctgaagcagcacttcggctacgaggcctttcggccggggcaggagggcgtcgtcgaggcgatcctcggctgtcgcgacgcgctggcggtcatgcccacgggcgcgggcaagtcggtgtgctaccaggtacccggcgtggttatggacggtttggcgctggtagtgagcccgctcgtgtcgctgatgggcgaccaggtgcgcgcgcttctggacgccggcatacgcggcgcctacctcaattccacgctcacgcccgggcagcagtccaccgtgctgcgccgcgcgctggacggcgcctaccagatcatgtatgtggcgccggagcggctggccgatccgcggttcctcgaattcgcgcaaagggcggccatcccgctcgtcgccgtggacgaggcgcactgcgtgtcccagtggggccaggatttccgcccgtcgtatctgaccatcggcgatttcatcgcgcagctgccgagccgtcccgtcgtggcggcgttcacggccacggccaccgcgcgcgtgcgcgccgacatcgtgcgcctgctcgacctgcgcgacccctacgaggtggtcacgggcttcgaccgcccgaacctgtacttcggcgtggagcggctcgatccgaagcgcaagatcgcgcgcatcgccggctacgcgttggagcatgcgggcgacagcggcatcgtgtactgctccacccgcaaggacaccgacaaggtgcacgccgcgctgctggaggcgggcatccgcgccgcgcgctaccatgcgggcatgtcggcggctgatcgcgccgagagccagcgtgcgttcatcgccgacgacgcgccggtgatggtggccaccaacgcgttcggcatgggcatcgacaagtcgaacgtgcgctacgtgatccaccacaacatgcccggcagcatcgaggcgtactaccaggaggcaggacgcgccggccgcgacggcgagccgtccacgtgccttctgtactggagcgacggcgacgtgtccacctgccgcttcttcatcgagcaggaatcgggcaacgaggagctcacgcccgaggaggccgacgccgtgcgcgcgtcgcgccgccgcctgctggcggcgatgaccggctactgccacaccaccggctgtctgcgctgctacatcctggaatacttcggggagcagcaggttccgtcggcttgccagccgacggaacgagccgacgctgcggaggcttctggcaccgaatcttgcggctccaagtccttctcacggcccgaaggccgccacctcggactttcaccgcaatcttcggcgccagaagcctcctcgctgacgttgcgaacgaccggcgacagaggtttttcctgcggcaactgctcgaactgcgcgggagagttcgagtcgatggacgtcaccgacaccgcgctcgccgtcatgcgttgcgtgcaggagctgcggggtcgcttcggcaagggcatggtggtggatgtgctgcgcggctcgcagaacgcgaagctgctggacatgcatctggacgaggccgcgtgctacgacacggtgaacgctccggctgcacaggtgaaagaagtgatcgagctgctggctgcaggcggctacctgctgattaccgaggggacgtacccggtggtgggtctggggccgcgtgcccgcgaggctgccgaagagggtttcagcttgtcgatgaagcgcgttctgcgaaagcccgagcgcacgcgttcggctgcaggcggttcgcacgtgttcggctcgtcgggagcgcccgcgaacgatgccgaccccgagctgttcgagcgtctgcgcacgctgcgcaagcgcctggccgacgaagcgggcaagcctccctacatcgtgttctccgatgcggctctgcgcgatatgtgcgcgaaaaggcctgcaaccgacgaggagttccttgaggtcagcggcgtgggcgctacgaagctcgcccgttacggcgaagccttcctgtccgagatagccgagttcgagcaggggcttgcaaacgggcgatgatccgcctcgccgcttccgacccgtgcgaaaatccgccccgccctcgcttgccctctaagctcgctcctcatcatctcgttacgcgagcgacatgcaaccgccacgcgtggcgcgcgggggcgcgctatcatcgcttcatcaaacaacaagaaggagcgatgggccatgatcaaggtcatcaagcacgagaacatgggcagaagcgaccgaggatggctgcacagcctgttccatttctcgttcgccgagtactacaaacccgataacatcaagttcggcgcgctgcgcgtggtcaacgacgaccggttcgacccgcacggcgggttcggcatgcatccccacgacaacatggagatcatcagctacgtcgtggacggccagctcacgcaccgcgacaacctgggcaacgggagccgcctcgagcggggcgacgtgcagtacatgagcgcaggaagcggcatcatgcacagcgagtacaacgatacgaacgaaccgctgcgtttcctgcagatatggatcttgcctgacgagaagaacgcggagccgaactatggcgaccaccgcttcgactgggaggaccgcgtggggaagtggatgcccgtcgcctcgggcgaggagggtttcgcgcctatccggatccatcaggatatgaaggtgctcgtaggcgtcatcggctcggacgagacgctgtactacgacctcgacccggcgcggcaagcctacctcatccagatcgagggcgaaggcatggtgaacggcaacgagctggacgcgggcgacgcggccgagatcaccgccacgcgcgaggtgtctgttcgcgcgaagacgccgtcgcactacattatgttcgacatggctgctgacgaggcgtaacgactttggcatgcagaaggcccgcggcaacgccgcgggccttcgttgcgcgtttgcgcaggaggaagggcgatttagagcttcggggcctcgggcgcttcgggggcttccggtgcggtcggcgcgccggagtcgctgcgggcgccgttgccgttgctgacgctcgcgccgccgccggaaaacgtgagcgtcacgtccccgctcatggtgcgagcgctcacatgcctcgacgctgtggcgctgccggccggcgagtgcacgtctccgctgaccgaagaggcctcgatggcgtattcgccgtccgaaccggagaacgaggcgttcacgctgccgctcgcggcatcgaacttcgcgtcggtggctgccacgcccgccgccaggatgtcgccgctacccatgcgggcgtcgagggtcgccgtgctcacgcctcgaagcagctgtccgccgctcgtcgtgtccagcttcacgatctcggtcgcctcgacgtcggagaattcgatgttgccgctcatcgtggttgcgctcaggtatgcgcactggacgcgctgcacctgcacgttgccgctggcggcgttcgtcacgatatcgtccgcggcgaggcgggagagcgagatgttgccgctcgcggttttcgccgtcactgagcccaacctgtccagatctgcggcatccacattgccgcccatgaggtcgatgtcgagcgtgcccgtgtagctgcgcggcaccttcagaacggtagagtggtcctcgaacgatccgatcatcatgatgccgatggccggctcgcgcgagccttcgacggtgacggtgccgccgttgtcgcccacgtcgaagctcttgcgctcgttcgtccagtacgtcacctcgatggcgtcgccgtcggtcggctcgatgcgcacgtcctcgcccatgtcgcgcaggacgatggcggtgtgggggctttccgcctcgggggcgaacgtcttcgtggaggacgtccaattgcgggattcggtcgagaggttctcgaagttgaacccggccgccgcgaacgcgccgaacgatatggcgcctccgccgatgacgaggatggttgctatgacgagcaacgtctttttgccgctagacatgagctgctccttccggcgcgatcgggctggcatcgttgcgcttcagcttgatgaacagcccctttacccagcgggcgaacgaatgcgtgaggttgacgagccccttgctggcggccagcacgccgaaccaagagaacaatcccaggcctgcaccggccaggccgcagccgaagacccagatgcccgagagcggaaaccccgtggccgcgcaccaggccaggccgaacacgccgatgggcgcgcatagaagcagcatggccacgacggcccacagcgccacgacgaccgaccaaatggccaggtagatggccaacaccatgcaggcgaacgccagcgccagcgtcacccagatgggggagaggatggcaagcagcacgatgttgagcgtgcggctgccggtgttcgccttcgcgatggccttgggaatgggcggcgtctcggcgacgatctgagctgcgatggcgtgcaccgatcccagcgcggccacggcttcctgctcgctcatcccgtcctcgatgcggtcgtcgatcatctcggcgtagaacgcgatcgattgttccacctcgtaggagggcagcttgccgagcgcatgcctgagcgcatccaaaaactcggtcttgttcatcggttggcacctcgtttcacatactcgtagacgtccaatacgtcgtcccaatccttcaagaactcgtcgaggtacgtgaccccggccggcgtgatgcgatagtacttgcgcaggcgcccgttgtgctcgatggcgtaaaccgtcagcagccccgctgattccaagcgtttgagcagggggtacagcgtcgattcggtcaaatgcaaactcgaaggcacgtctttgacgatctggtacccgtacgagtcctggcggttgatcgatgcgagcacgcaaacatcgaggaaacctcgtttcaattgtgcatccatcgcatacctcctttcgccttatactatatgacacatagtataaggcgtcaacgggtatttggagattccgcgggaaggatggcggggaaggggctgcgcggctgcgacggctgcgacggctgccgatgagcttccggggctgcgcggttgcgacggtcgccgagctgcgacggctgccggggctgtgctgctgcgacggctgccgatgagctgccggggctgcggggacgctccgagatggggaagggcctggtcgcggagccttcccgctcagccgaagcgcgcgagtgtctcacgtgaaacatttgtgcggttctccatcgaagccgaggcgcgacggcatcggtcgcgagaacccgggcgggagacgccgatcgcgcgctcggcgccgttacggtagcgcgcggcacgtcgaccggcgcgcatgtttccgtggttccatgtgcagcaaaaacgagcttttggcacccctcggtgctcttcggcattttgctcgttgaaactttgcagcaaaaccccaggtcgcgtttcatcgagccttgggaatgcggcattcgacctcggttcggcggtttccggacgggtccggcgtgccaaaagggaccccggacgtttttctggactgaatttcgatgaggaaagaggtccgtgaatggcttacggcaaagaatacaaggaggaggtcctgagcaggttccacgcgagcggcatgtcgatgcgcgcggcgtgctcgagcctcgaggggttcccgtgcgcggcgacgctctcggccttcgcgcgcgaggaggggccggcctcctgcgcccgcccgcgctcgcggtgccgggcaggtgcgagggccgccgggcatgggagccctaccccctcgggacgaagcgggaggcgatgcggctcctcgcgggcggcatggagccgcgcttcgtcgccgggcgcctcgggatcgcgagcgccgcccccgtccgcctgtgggcctccaggctggggcgcctcgacgggctcgacggccggtcccgtcccgacggcgagcgcgagcgcggggaagctgttacgatgttcgcgcgagggtcgtccgtctccgagatagccggacggatcggcgcggacaggaggaccgtgcgccgctggctggacaaggccggcgtcgagcggaagcgcgcgacgaaggggaagggcggcgagggcgtggcgaaggaagaaggcggcgagcggggcgaatggtcccgcgcatggggcgacctccccgaaggcgaccccgtcgagcgggcgcggctggccgaggtcaggctcgcggaggcgctggcggtgttggacgtcctaaaagcaccaggcccgggctctttgagcaattcggagaagcgccgggcgggcgagagggcgagggcgatggcggcgagggcgagggtcgatgacgtcctgagggatttccgcatcgccaggagcacgtacttctcgcaggcggcgatggcggccaggcccgacaggcacgcggccctgcgggcgcgcgtgcgcgcggccttcgagggctcgaagggccgctacgggtcgctgagcgtgtgggcggccctgcggcggggcgagggcgcgcccgtgcgcgcccgcgacctcgcgcccggggacatggaggcccccgtcgtcgtctccgagaaggtcgtgcgccggatcatgcgcgaggaggggctcgtcccggtccaggtcaaggagcgccggcgccacagctcctacgcgggcgagaccgacgagcgccccgcgaacctgccgcttcgagaggacgggacgcacggcttccgcgccgacgcgccgggcaggctcgtcgtgaccgacgtgaccgagttcgacctcggcggcctcaaggtctacctctccccgatcatagactgcttcgacggctgcccggtggcgtggcggacgtcgacgcgcccggacgacgagctgacggcgggctcgctggaggacgcgctcgggcgcctggaggagggctgcgccgtccacaccgacggcggcggcaactaccgctccgccagatggagggcggcgctcgccgcagccgcgtaggagtccagaaaaacgtccgtgcccccaaacctcgtttttgctgcacatcgccttgaagagacgcgcgaacccgcccgacggcacgaagcgtcgacccggcgcggcgcgatccgagccgcgttcctcaaggcgcgcgggcgttgagaaaaatcatgcggggcgggagcgcggtgggttggcaacgccgaggtttgctattatagacgggttatgttctcaccggtgccaccttcggttttcgagcgatacgcgcggagccgatgcgtgaaaacgagagaaggaaagcaggctctatgacccaacacctcaccgagcgcgacgtccgcagcatcgcggagtacgcgcgcatcgggctggacgccgacgaagtcgtgcagatgacggtcgatctcaacgccatcatcgacagcctgaagcccatcaccgaatacgacctcgacggcgtggagcctacgttccaccccatcggcggcctttcaaacgtcatgcgcgaggacgaagaatcctcctccttcacgcagggagaggcgctggagaacgcgccgaagcagcaggacggctgctttttgatcccctcgattctgggcgaagggggcgatcgctgatggctgcaaccgcacccgtgttcgccgcaatgggcgtgcgcgagatccgcgcgggcctcgcctccaaggacttctcggcgcgcgagatcgccgagagctcgctcgcccgcgtgcgcgcgctcgacggcgcgacgcatgcgttcctcgaaaccaccgagcagctggcgcttcaacaagcggctgcgctcgacgccgccgtcgcggccggtacgctggacgcgtgcggcccgctggccggcgtgcccgtggcgttcaaagacaacatgaacctggagggcacgcacaccacgtgctcgtccgcgatgctggcgaactacgtgtcgcccttcacggccacgtgcgttcagcgcaccatcgaagccggcggtattccgctgggcaaactcaacatggacgagttcgcgttcggctcttccacggagacgagcgcgttcggctccactaggaatccgtgggatctctcgcgcgtgcccggcggctcgtcgggcggcagcgccgctgccgtgggcgcggggttggccgccatcacgctgggcagcgacacgggcggctccatccgccagccgggcagcttctgcggcgctgtggccgtcaagcccacgtacggcgtggtcagccgctacggcgtggtggccttcggcagctcgctggaccaggtgggcccgttcacgcgctcggtggaggatgcggctttcgcgctcaacgccatcgccggccgcgacgtgctggactgcacgagccaggacttggacgtcgacttcacggcgaacctcgccgagggggtcaagggcatgcgcatcggcgtggtgcccgcgttcatggaagcccagggtctcaccgacgaggtgaaggccaaggtggaggaggccgtggagcatctgcgcgcgctcggcgccgacatcgtggaggtggagctgcccaacgcccaggccgctatgagcgcctactacgtgctgggcccctgcgaggcgttcagcaacctcgcacgcttcgactcggtgcgctacggctactgcgacttgggccacaaggacctcggcggccagtacgaggccagccgcgcgaagggcttcggccccgaggcgcgccgccgcatcatgctgggcagctaccttctgtccgcaggtgtgtacgacacctactactacccggcgcagcaggtgcgcacgctcatcacgcaggactatgcgcgcgcctacgagcaggtggattgcatcgtcgcgcccgtgtcgccgcgcacggcgttcacgttcggcgaagtgagcgaccccaccgacatgtacctgtcggacatgttcaccatctccatcaatatcgccggcaacggcggcatgagcctgccggtgggcctcggcgcccagacgcagctgcccgtgggcgtgcagctcatctcgccccagttcaaggaccagaacatgctgcgcgtggccgccgcgctggaaacggtgtacggccccgcccccgtggccccggccttcgcccctggccaaccctaccccgaaggatcgatggcggacatccccgacgccgccgacgcgaccccaggcgtcgacctgccgggattgctgacggaggagggcggcttcggcgttgcccaccaagcgagttccgcagcgcagcgaggactgtctgagcgactgggcaatgccgaagctgccccgttccaggtagaaaaggcaggtgagtagccatgcggaagctcgaagaggtgctcgaggattgggaggccgtcatcggcctggagatccatgccgagctcaccacgctcgacaccaagatgttctgcggctgcaagctggagttcggcgccgagccgaacacgcacacgtgccccgtgtgcctggggatgccgggcgcgctgcccgtgccgaaccgcgcggccatcgagtccatcgtgctggcgggcctggccacgaactgcgacatcgagaagcactcgatgttctaccgtaaaacgtacatgtaccccgacatgtcgaagaactaccagaccacgcagggccccgtggcgttctgcatgcgcggccacctcgacctcgacgtggacggcgcggccgccaaggagcgcatcgacctggacggcctcgacgtgggcgagagccgcggcaacgtgacgcgcaccgagaccggctacaccgcgcacgtgggcatcacgcgcatacatatggaggaggacgcgggcaagatggtgcacatcggcggcggcgaaggccgcatcgccggcgccacgcactcgctggtggactacaaccgcgcaggcaccccgctcaccgagctggtcaccgagcccgacctgcgcacgcccgaggaggcgcgcctgttcatgcagaagctgcgccagatctacctggcgctgggcatctccgactgctcgatggaagagggctccatgcgctgcgacggcaacgtgagcctgcgccgccgcggggcaaaggagttcggcgtgaagaccgagctcaagaacatgaacagcttcaagaacctccacgacggcctggcctacgagatctgccgccaggcggaagtgctcgaggagggcggccagatcttccaggaaacgcggcattgggacccgtcggccaagcgcaccatcgtgatgcgcgtgaaagagacggccgacgactaccgcctgttccccgatccggatctcgcgccctacgaccttacggacgagtggatcgattccgtgcgcgcgaagctgcccgagctgcccgaccagaaggcggcccgcttcgaggacgcgttcggcctgagcgcctacgatgcgcgccacttggtggagcatcgcgccacggccgacttcttcgaggcgtgcatggagctggccggcgccgatgcggccaagctggcgaagccggtggcgaacctcgtcatcaacgacgtgaccgcctacctgaacgcgcacgaaggcgttcagctggccgacacgccgcttaccccggcgcgcgcgcttgcgctcgtgcgtctcaccgccgaggacgccatctcgtccaagcaggccaaagaggtgttcgcggccgtgctcgacgaggacaaggatccggccgccatcgtggaggagcgcggcatgaagcaggtgtccgacacgggcgccatcgaagccgtcgtcgacgcggtgctggccgccaaccccgacaaggtggcgcagtaccagggcggcaagaccggtctcatcgggttcttcgtgggccagtgcatgaaggagatgcgcggccagggcaacccgaagctcatcaacgagcttctggcgaagaagctcgggtaagcatgcgcgccgccgcctcgggataggcggcggcgcgcttcgttctcgtaaaggggaagaccaatggatttcaatgagatgctcgtcggcatcaccggcgaggtgagcgggtttctgtacacgtacatcctgctcgtcctgctcgtgttcgtgggcgtgtacttcacgatccgcacgaaaggcgtgcagatccgcttcatcaaggacatgttcacgcagttgacggagaagaagcacgtcaagggcgagcgctccatctcgtcgttccaggcgctcatggtgtctacggcctcgcgcgtgggcacgggcaacatcgcgggcgtggccacggccatcgccacgggcggcccgggcgcggtgttctggatgtggctcatggccatcgtgggcgcggcgtcggcgttcgtcgagtccaccctcgcgcagatctggaaggtgcgcggcaaggagggcgagttccgcggcggcccggcctactacatcgagaaggcgctcggcaagcgttggctgggcatcctgttcgccgtgctgctcatcctgtgcttcgcgttcggcttcaacggcctgcaggccttcaacgccacctcggcgctggaatactacattcccgactacgccacgaacggcacggccatcgcctgcggcatcgtgctggcggtgatgaccgcgttcgtcattttcggcggcgcgaagcgcatcagcgtcatcacgtccatcatcgtgcccatcatggccatcggctacatcgccatcgcggtgtggaccaccctctccaacatcacggagctgccgggcgtgttcgcgatggtgttcgcctcggccttcgacgtgcaggccatcttcggcggattcgcgggttcggtggtcatgctgggcatcaagcgcggcctgtactctaacgaggccggcatgggctcggcgccgaatgctgcggccacggcgtcggtgtcgcatccctgcaagcagggtctcgtgcagagcctgtccgtgtacatcgacacgctgctcatctgcacgtgctcggctatgatggtgctcgtgttctacgtgcaggatccgcaggcggcttccgcccttaacggcatgccgctcgtgcagatggccgtgaacaactcggtgggcgagttcggcatccacttcatcacgttcgccatcttcgccttcgcgttctccagcctcatcggcaactatttctacgccgagaacaacctgcgcttcatcaagggcgacagcaaggcgctgctgttcgtgttccgcgtggtgtgcctgtgcgtggtgttctacggcgccgtgaacagcttcgacttggcgtggaacctcgcggacatcttcatgggcttcatggcgctcgtgaacctcatcgccctgctcttccttggaaaatgggcgcttgcggcgctcgacgactacacgcgccagcgtaaggagggcatcgatccggtgttcgtggccgatcgcattcccggtatgccgaagaccgaatgctggcacgtgtccgaggtgcacgactacggcaagccgccggtcaaggagtatctggacgacgcgctcgaccccgagtacgtcgggctgaactgacgcgcgccgctggacgggcgtggtaggatagagggaaacgcgcgcgggcgggcggcgcgccttgggaaaggaagcggcatggctgacgacgaccgtcgcgcgggcgactggcagaagcgcgacctgcgcaagaacgcgaacgacctgatcgaagagccgaaccagaaggcttggtgcaagcagacgttttggatcgtgttcttcctcatcgtgttctggccggtgggtatcgtgctgtgctggaggagcagctggcatatcgtggcgaaggtcctcgcttcggtggcggtggcgttcatggtgtacttctcggtgaccatgtaccaggctacgcaagcgctcatggcggcgggcatggcgtaggtcgtccgcgccgctcggttcgcgactctctgcggaagaagggtcgtcccgctcgcaaccgagcgggacgacccttgctttttcggaaggcgaacgactcctgtgcgatttttcgcctttcgccgcaagagcgtatcgcgaatgttccttgtgcgctatcatttccaacgaaaacagtgatccattcagtacgagttgcacaaggataacgatatgacgaacttcgcgaacggtcacacgaccgtcctggcaggccacggtttcgccgagtccggcccctacctcttgatcaacgacgtagagcaaggcgagcagcaccgttttcccgtgttgggcaagacgttctcgttgcgccgccttcccacgcgccgctgcgtgggacgcttcgatctggcgtcctacacgaaggaggtgtgcccgctcaacgtggagctgcttcccgatgcgaaggacacgatgtgtccggcatgccaggaggccacgggcttcaacccctcgttctactacgccgacttcatctccgcccagcagcgcgcctacaacctgacgccgcatttcacgtacctggcgtacttctcgccgaagcacgtgaaagccggcatctcgtcggagacgcgcggcatcgagcgcctgctggagcagggcgcccgcgcggcccgcatcgtcggccgcttcggatgcgccgacgacgcgcgcgagctggaggcggcgctgtgcgcgcagcccggcatcctggagacgatgcgcgcgtcgaagaaagtggacttgctggtgaacgagcgcttcgatttcgtcgaggcgaaggcggtgctcgacgacgtggtggaacgtctgggtctcgagggcgctgagccggctcaggacctgtcgccccactacttcggcggcccgtcgcccgactgccacgacttgcaggtgcccgaaggccacgacggcgaatgcggcggacgctgcatcggcatggtgggcggcgcgctggtgttccagcaggagggcacgaactacgtcgtgtcagtcaaagagtgggagtcgcacgaggtcgagctgctgctggacgaagtggtgtgcacgtacgacttcgcgccccaacagttctccttgttctaaggcggggtgggcgagggcgtgcgccttcgccccgacggcggcatcgcgtgtgcggtatcgaccgaaatgccgcagatccggcttccctcgacttccttgccttttctacgggcaggcttcattgcggcttcggaatcgctgcttttcaggaacggcacggatggtcggttcgatctgctgcaaaaacgggtttttggcggcaaggggaacgaacgctcccggcggaaatcttgcgaccaggtgtttttcagacttccccgtgttcgagggctttcggtggcgctgaagccgcgaaattgctgccaagaacccgtttttgcagcagatagctcagtccaaggccgcgtcccgaatcgtggtgtatcagggccatcgccggagaatcgccggcacccttgcgaggtgaatcttagccttcgtcctccttcgggtcaatggcgctccctatgatcttgcgcgccgcctcgcgggcggcgagcacctcggcctcgccgggggcctcgcgctcctgggccttccaggcgtgcgcgagcgagggcctggagatgacgcagcgcgccgaccactcctcgtcggcctcgatgagcgccgctcccaccaggcggatgagcgactcgcgcgaggggaacccctgcacgacgcgcgtcctgcgcttgatctcgcggttggccctctcctggacgttgttggtgcggatcttggtgcggtgcgtggccgggaacgccaggtaggcgagcgccgcctcctcggcctccaagagcacgtttccggccgccctcgagatcttcagcacctcctcggtcgcctcttggtagcacgcccgcacgaggacggggctcttctgcgcgaagacggccttcatggcctcgcgcgcctttctctggtcgtccttcctgtggatgcggcccgccacgttgcgcatgaggtgcgtgacgcagcgctgccaggccgctccttggaacgtctcggctatcgccttcgcgagcccttcgtgggcgtccgagacgacgaggcgcacgccgtcgacgccgcgcgccctcaggccggagaggaacgccttccacccggcgtggctctccgtgtccacgcagtccacgccgacgaagcgcttgtggcccgtgtcgtcgagcccgatcgcggtcacgacggcctgggacgccgagcgcccctccacgcggcacttcacgtaggtggcgtcgagccacaggtaggcgaagcgcaccccgtcgaagcgctgcctcctgaacgcgtccacctcggcgtccaggcactcgcacaggcgcgacacctgcgacttcgacatcgacctcacgccgagctcgcccgcgacggcctccaccttgcgcgtcgatatccccatgacgtacatctcggccaccgccgcgacgagcgcccggtccaccctgcagtagcgctcgatcaggtcctcggggaagaacgagcctcggcgcagcttcggaatcttgagggtgacgtcgcccgcggcggtcgagagcccccgctcccggtagccgttgcgcgagttgacgcgcccctcgtcgcgctccccgtagggggcgttgcacgcctcgtcggccttcgccgacatcgcggcgttcgccaggagctcgagcatcctgcgcccgaaggcctgcaggtcggtgcattcctcgaggatcgcgaacgcgagccccttcacttcggggtcgttgaatagtagagtgtccatagcgggcatcgccttccttcgaatctgtcttttgtggtgattgacgattctagacgatgtccgtttttctcgggcaggcttcgcccgccctccagaaacggattgatacaccaactttcgggacgctacccagtccaaagcgtacatccgtcgcttgatgcggacggcgtttttccgcgtgcggggaatcgataggatgcagcgtccttttcttcggctaaacattctttcctcgaggtgcggcgagccgtgatcgcgctccttctatgacgtaaaataaagcggttgtccgaaacgttctgcaaacggcttgctttactactctactgtgataaagtactaccagcaaacgaacggcgtgcgcggccgcgtgcgaaccggcgaaacgatgcagcgaaggaagagaaccatggattacgtgacaccggcagggttcagagacgtgctatccgacgaggcgtgcatgcgcgagcgcatcgctcgcgacgtgcaggcatgcttcgcggcgcgcggctacctgcccatcgagacgccgacgctggaggtcatggacgtcatgcgcgcgggcggccgtatgcccggctctcccttcaagttcttcgacgcgagcggcgaccttctggccatgcgccccgacgtgacgctgcaggtggcgcgcatgtgcgcgacgcgcctcgcgggccagccggggccgttccgcttccgttacatgcagcgcgtgttccgcgaggccgaagggcgcatgcaggcgcaggcgcgcgagatgacgcagatcggcgtggaatgcatcggcgaggccgggccgcaagccgacgcggaggtggtggagctcatggcggaggcgctggagctcgcgggcgcgcgcggctgcaagctggccctggccacggtgggcgtgctgcgcgcgctgctggcggccagcggggcgtccgcgcagtggaccgagcgggtgctggcggcgttccacgcctcgaacttcgtggaggtcgaccggctcacgggtgaggcggcggccgtgccgcccgtgttcgccgcggccatccgcgcgctgccgcgcatccgcggcgggcgcgaggcggtggaggaggtgcgcgcgctcgtggcgcccctggggtgcgaggacggcctcgacgactttgcccgcacctgcgacctgctggccgaggcgggcttggccgaccgcatcctcgtggacttctcggtgatgagctcgttcgattactacaccggcatcgtgttcgaggcctacgcgcccgagctgggcacgccgctgggcagcggcgggcgctacgacaacatgatcggctcgtacggcgagagccgcccggccgccggcttcgcgttctcgttggagcaggccatggccgcggccgccgccgccgagcgctcggtcgacgacgaagccgcgcgcccgctgcgcatcgcggtgccgaagggctcgctcaacgccgacacggttgccgcgctcgaggccgcgggcctcgatacgaccgggctcgacgaccccggccgtcagctcatcatccgcaaccccggcgtcgagtacgtcatcgtgcggcccaccgacgcgcccgcgttcgtgtcgctgggcgcggccgactgcggcatctgcgggaaggactcgctgctggaagcgcagtccgacgtcgtcgagctggtcgacctcggatacggcgcatgccgcttcgtggtggccgagcccgccggtgcggccgaggccacaggcgagcactaccgccgcctgggatcgctgcgcatcgccacgaagtaccccaacatcacgcgcgcccactacgcgaagacgggcacgcaggtggaaatcgtgaagctgcacggcaacatcgagctggcgcccctcacgggcatggccgagcgcatcgtcgacatcacggccaccggcaccacgctcaaggagaacgacctcgtggtggtggacgaagtcctttcgtcgaccgcgcgcttcttctcgaacacctgcgcgttccgcacggacgcgcgtatcgtacaattggcgaatacgctgcagcggaacgcggaagcctccgcgagcccggccggcgaggaaaaggagtagcccatgcgccgcatcatcttgcaacctggcgagcagttcaccaacgcccacctcaagcgcaccggcgcgttcaacgcccaggccctgacggcggccaccgccatcatcgagggcgtgcgcgagcgcggcgacgaggccctgcgcgcctacaccgagcagttcgacggcgtgcgcgtggaggagttccgcgtgtcgcaggcggctatcgcagaagccatcgtgaacgtcgacgacaagacggcgcgcgccctgcgtcaggccgccgcacagatccgcgacttccacgagcgccagaagcagcagagctggttcaccgtgcgcgaggacggcgcgctcgtgggctcgaaggtggagccgctggaatccgtgggcatctacgtgccgggcgggcgcgcgctgtacccgtcgtcggtgctgatgaacgcgctgccggccgccgtggccggcgtgaagcgcatcgtatgcgtgacgccgccgacggccgacggaacgctggatccggccattttggaggcgtgccgcatctcgggcgtcaccgaaatctacgcggtgggcggcgcgcaggccatcgccgcgctggcgtacggcaccgagtccatcgcgcccgtggccaagatcaccggacccggcaacgcctacgtggcggcggcgaagaaggtggtgtcgggcgatgtgggcatcgacatgatcgccggcccgtccgaggtgtgcgtcgtggccgactccacggccgatccggcgctcgtggccatcgacctcatggcgcaggccgagcacgacccgctggccgcctgctacctggttacgttcgatgcggcctacgccgacgaggtggagcgcatggttgagcgccacctcaagtcgtccacacgcgccgagatcacggcggcatcgctggccgaccagggcctcatcgtcgtgtgcgacagcatgccgcaagccatcgaggccgtgaacgccatcgcgcccgaacacctcgagctgcacgtcgaccacgccttcgacctcttgggcgccatccgcaacgcgggcgccatcttcctgggcgcctggacgcccgaggccgtgggcgactacgccgccggcccgaaccacacgctgcccacgggcggcacggcgcgctacgcctcgccgttgtcggtggacgagttcgtgaagaagtcgagcgtcatccagtattcgtcgcaggcgctcgcccgcgatgccgacatggtaaccaccatcgcgcgccacgagggcctgtgggcgcacgccatgagcgtggagatgcgcaagaacctgctcgacacgggcaacgtgtatgggatcgagggcggcgacggagcgggccgcgcggccggagacgggggtgccgatgcgtagcgtgtgcgcggccgcgccccagctggcgggcgtggtgccctacgatccgaagtatttgcccgccaccgccgtcctctcggcgaacgagaacccgcacgacgtcgacgacgagatccgccgcgacatcatgcgcgaggtgaagcgcctgcccctcaaccgctacccggacccgctggccaacgacctgcgcgacatgatcgccgaagcgaacgggctcgaccgcgaccaggtgctggtgggcaacgggggcgacgagctcttgttcaacctggcgctggcgtggggcgggccggggcgcacgttcctcaacctgccgcccacgttctcggtgtacgacgcgaacgcccgcctcacgaacacgtcggtggtggacgtgccgcgccgcgccgacttctccatcgacgaggaggccgtgctggcgcgcgtcgccgagggcggtatcgactacctggtggtgaccagcccgaacaaccccacggggcagcttgccagcgagacgttcatcctccggctgctcgacgccaccgatgcgctcgtgatggtggacgaggcttacttcgagttctcgcgccagacgatgcgcccgtatctggcgcagcacaagaacctcgtcatcctgcgcacgttctcgaaggcgttcagcctggccggggcgcgtatgggctacatcctgggagacgccgaggtcgtgcgcgagttcgtcaaggtgcgccagccgtattcggtggacgccgtctcgcaggccgttgcgcgcgtggtgtacgcgaaccgcgcgaagttcgagcgcggcatcctggccgtcatcgaggagcgcgcccgcctgatcgagggactgaagaggattcccggcgtgaagcccttcccgtcggatgcgaactacgtgctgttccgcgtggagaacgcgcccgtcatctgggaggcgctgtacgagcgcggtgtgcttgtgcgcgatttctcgcgtgcggcgcatctggagaactgcctgcgcgtgaccgtgggcgcctccgaggagaacgacgcgtttttgcgcgcgctgcgcgatgcggtgatgggcaagtgcgatttgaaggttccgtcgacctgacggccgacggaacgagccgacggctgcgacgcgaagctagtccccgtagggggcggcttcccgtggtgcccgatctcgcggcgaggtcgaggactcgcgtaccgaagtatcccctacggggacttccttcggggcgcgcttcgtcctcgccctccccacgatctcgggcaccacggaaaccctcgctgacgttgctggaccagcgataaagaaaggccaaccatgaaccagagaaccgccgaaatcgtccgcacgacgaacgagacggacatccgcgtcgcggtgaacctcgacggcgcgggtgcgaccgacatcgagacgggcgtgccgttcttcgaccatatgctgacggccttcggaaggcatagcctgatcgacctcgacgtgcgcgcaaaaggcgatatcgaggtggacgcgcaccacaccgtggaggacgcgggcatcgtgctgggccaagccgttgcgcgtgcgctcggcgacaagcgcggcatcgcgcggttcgggtcgctttcgcttcccatggacgaggctctcgtgctggcggccgtggacatatcggggcgcggccagctgcactgggccgtggacgtgccctgcgtcatgctgggcacgttcgacgcgtcgctggccaaggaattcttcatcgccttcgccgcgaacgcgggacttacgctgcacgtgcgcagcctggctggcgagaacgcgcaccatatcgtggaggcgtcgttcaaggccgcagcgcgcgccttgcgccaggccgtcgagctcgacccccgcatcggcgatgcgctgccttcgacgaagggcgcgctatgatcgccgtggtcgactatcataagggcaacctcaaaagcgtcgagcgcggtctggtcgcggcgggcgccgaggtgctcgtcacgagcgatcccgccgccatcgccaaagccgatgccatcgtgctgcccggcgttggcgcgttcgccgacgcggccgccaccatgcgcgagctcggccagatggacgccatccgcgagcgcatagccgccggcgtgccgttcctcggcatctgcctgggaatgcacctcctgttcgaagaaggcgtcgaaggcgcgccgcgcgaggacgacgaaacctcgacccacaacgcccgcggcctggcagtgctgccgggcgtggtaaccaagatgccgaaacaggatgaacactccctctcctacaaggtgccacatgtaggttggaacaccgtgcatttcggagacggcagcgaggggttcggcggcgcccaccaagcgagttccgcacgagccggacagtcctgtggactgtccgagcgagcaggactgtctgagcgactgggcgttgccgagctcctcgcggacaggtttcaggaatgccccctgttcgaaggcataccgtcgggcacttacttctacttcacgcatggctacatcgcgccgtcgggtcccttcgtcgtcggcgagacgacgcacagcgtgacgttcccgagcgccgtccagtacggcgaggcggcgtacggcgtgcagttccatcccgagaaaagctcggatgcgggcgcgcgtctgctgcagaacttcgtgtccatcgtgaaaggggcgtgagcgccatgtacctgcttccagccatcgacattctgggcggcaaggccgtccgcctcgccaaaggcgactacgaccgcgtgaccgtgtaccacgacgaccccgccgcgcaggcgcagctgttcgaagagcagggcgcgacgtggctgcacgtggtggacctcgacggcgcgcgttcgggcatccctgagaatatcgccatcgtcgagcgcatcatgcgcaagaccctgctcaaggtggaggtgggcggcggcgtgcgctcgctcgacaccatcgcgcgcctggcggacgcgggcgtgtcgcgcgtggtgctgggcacgtcgctcgtggccgaccccgacttcgccgaggccgccatcgcgcagtacggcaagctgctgtgcgcgggcatcgacgcgaagggcggcgaggtggccgtggccgggtggcgcgagggcgctggcgtggccgccgaggagctggcgcgcgacatgtcggcgctcgggttccggcacctcgtgtacaccgatatcgcgcgcgacggcatgcagaccggcatcgaggccgcggcgtacgtgcgcatggccgaggcgttcggacatccggtgatcgcatcgggcggcgtggccggcgtggacgacatcgtgcgtttgggcgaggtggccggcagcatcgagggcgtcatcgcgggacgcgccgtgtacgagggcgcgctgtcggtgcaggagggcgtgcgcgcctgcgacgaggccacgcgccgagccgaggccgccgccgtccaggcgaacccttgtggaatgtgagtccaacatgtttggtaaggtcagcgagcgggttcttcgcgagcgcgattgccgcgaaggctcgacgaagcgtgccttgggcacgtgaggagaacctggagcggcaagcgtgccgcgaagtacccgcgcagcgtcggcacgtccgtcgttgcgttagcaacgacggaaggagcgagatgctagcgaaacgcgtgataccttgcatggacgtgaaggacggtcgcgtggtcaagggcgtgaacttcgtgaacctgcgcgacgcgggcgatcccatcgagctcgcgcagcgctacgacgaggagcgcgccgacgaggtgatcttcctcgacatcacggccacgagcgacgaccgcgccaccacggtcgaccttgccagccgcgccagcgagcaactgcatctgccgtactgcgtgggcggtggtttccgcagcgtggccgacattcgcacgatgatcgcggccggcgctgacaaggtgtcggtgaactcggccgccgtggccgatccgtcgctcatcacgagcgccgccgcggcgttcggctcgcaggccatcctctgcgccatcgacgcgaagcaggtgacgggcaacccgaacaaatgggaggtctacgttgcgggcgggcgcaaggccacgggcatcgacgcggtcgcctgggcgcaggaggcggcccggtgcggggcgggggagatcctgctcaccagcatggatcgcgacggcagccgcgacggcttcgactgcgcgctcactcgcgccgtcgcgcgtgcggtggacatcccggtcatcgcctcgggcggggtgggcaagctcgagcacttcgcccaaggcgtcatcgagggcgaggccgatgccgtgctggctgcaagcgtcttccacttcggcgagctttccgtccgtcaagtgaaggagcatatgcgcgcccagggtatccccgtgcggctgtaggggtggggcggccctcgtttccggagcgaacgcgacgacgggtcgctcgaccgcgatcctccatcgcgtcaaggggtcgcacggccgagccttccgtgcagctgaaagcgctgcgactggcgaaaaagcatcgaattcggaagtttctagctgggtcgcaagctcgtcggaggctctttttgcgcatagagcctggttgctggcttgctcctttccgctcccgggcgccgcatgcgcttgaaacgggcgatgtcttccgaattcgatggcttttcgccattcagaacgccgtaggccgcacaggtggaggagcgatccggttttcggacgatccgacggcatggtttgggatcgtcccgaggacgttcacgcgccggccttccgccttcgcaggagagaagcgaggggcggatgcaggctgcggttgcgcaagcagccgcagtacatcgatcgagtgaggattataggtatgaacattcctggcatcgcttacaacgccgacgggctcgttccctgcatcgtgcaggatgcagacacgctcgaggtgctcatgatggcgtggatgagcgaggagtcgcttgcgctcacgctcgagcgcggcgagacggtgttctggagccgcagccgccgggagctatggcacaagggcgccacctcgggcaacgtgcagaagctcgtggagctgcgttacgactgcgatgccgacacgctgctcgcgctcgttcatccggcgggtccggcctgccataccggcgagcgcacctgcttctaccgcgcgttcccccgctagccgcctctcgctcggaacgctcagtgcagcgaggcccgaggattccgcttatgttgagccgttgcatcataggggttgtgaggatgccgatcgtgcctcataatattgcgttcgattacgggatggtttagaaggggacgcgagtgactgacaagtcgacggcaggccgtgacggggaagcgggctcgaccggcttcgctcgggtttccattgaagccccgcgcatcgatgccgctaccgggctgcttggcaaagaagccttcttcgacgaggccgctgcgtatcttaggcattcgggcgcacgcgatgtcagcatcgtctgcttcgatgtcgaccatttcaaactgttcaacgatctgcacggacttgattgcggcgacgagcttctaaggtacctgggtcgcgccctcgccctccgcttctcgcccgacggggcgcaaccgctcgcgcgccttgcggccgatacgttcgccttgtgcgcgaccggcatccgccccgagcgcgtcgagcgcatcctcgtcgacatctcctccgaatgtccgaacggcatcgacgccatcgtgcgcgcgggcgtgtaccgcatcgaggatcctgcttcgccggtcagcatcatgtgcgaccgcgcggtcatcgcgcttcgcacggtgaagggcagctacttcgaccgcgtggctttgtacgaccccggcatgcgcgaggcgctcgtcctcgaacgcgaggtcgtcgccggcatagaatcggcgttgcgcgaggatcgcatcgagctgttcctccagccgaaatgcaatatacgcaccggcaagatcgtgggtgccgaggcgctggcccgttggcgccatcccgagcgcggcatcgtcgccccgggcgagttcatcccgctgatcgagcgcaacggccttgtgcgctcactcgacctgcgcgtgtgggagaagaccgccgcgtggatcaggggcctcatcgacgaaggagtgcagcccgttcccgtgtcggtgaacgtgtcgcgcgccgacatctacctcgtggacgtggccgccgaactgcatgcgctcgtggagcgctacggcatcgaaccgtcgctcatcgaggtggagatcaccgagagcgcctattcggaacgccccgatcgcatcgtggccgcgttcgacgagctggccgagcgcggcttcaccgtgctcatggacgacttcggcagcggctactcgtcgctcaacatgctgaaggacatcaacgtcgacgtgctgaagatcgacatgcgcttcctcgaccgcgacgaccggcgcagcaaggacatcatggaatcggtcatccgcatggcgcgctggctggacctgcccgtcatcgccgaaggcgtggagacgcgcgagcaggtgaacttccttttggacgtggggtgctcgtacgcgcagggctactactacgcgcgcccgatggaggcggcggcgttcgaggcgctgctgaccgacggttcgaaagttcagcacgagcaatgcgctctgcaggatgcgcgccgtcccatcctcgatttcagggatctgctgcatgagaacaccatcagcgaccgcatgctttccagcatcatcggctcggtggcgctgtactcgtatgccgacggcgatctgcgcctgattcggggcaacgaagcgtaccggcgcttgatagcgacgctcggggaaggcgtgaacggcgccgaggagggcggcagcctgcttcctttcgtgcatgacgaagatcgggacgccctcgtggccgcggcggaggagacggtgcgctcctgccccgacgacggggtggaggtggtcgtgcgccgcatgggaacgaacggctgccattggcataagatgcgcctgttccatttgaacacgacgaacggttcggccacggtgtacggctccgtgaccgacgtcacggagcgcatggagtacatggaggcgctgcgcaagagcgagcagcgcttcgagatgaccttggaagccagcggcacggtggtgttcgagctggacatccccacgcgcaccgctcgctattcggagttcttgcagcaggcgttcggcttggccgagaccgtggcgaacgccccggaggggttcatcgagcaggggacggttgccgaggagtccatcgaggattttcgcgccatctaccgagacctctacgccggcgcgcctcgcacgtcggcggttgtgcgcgccatcatgggagacgggtcgcgtgcgtggaaccgcgtgacgcttctggccatgccgaacgaggcgggcgcgcccgtcaaggccgtcggcctcgtggaaaacgtcacgcgcgagacggagatggatcttttgctgaagcgtctcggtcgtttcgagcaagattgaggatcacgccgtccgcaaggcgcgcccgcaccgtttcgtagaccttcctccatcgcttttacacgatacctgccgctttgcgcttgaacgaaggaaacacatgcggtaccatgatgatcagttcttttatctcacagcacacatccaacacacccgcatctcatcacggaatccatgcgcgccgtcgcgcgcgtttcacctgtaatagccattgtataaggaggacctgggtgaagttttttctggacaccgccgatctcgacgaaatagaagaggcggccagctggggcgtgctcgccggcgtcactacgaacccgacgctgtacgcgcgcaccggaggcaagctcgacgatttccacaaccacatcaagcgcatctgcgaaatcgtggacgggcccgtctccgctgaaagcgtcgccatgacgcgcgacgagatcatccgcgacggccgcgagctggccgcgcttgccgacaacgtggtcgtgaagatccccaccatggtggagggtctcgccgccaccaaggcgctctccgaagagggcatccccgtcaacatgacgctgtgcttcagcgtgccgcaggccatcatggccgcccgcgccggcgcccgctacatcagccccttcgtcggccggttcgacgacatcgccgaggacggcatctcgcagttggccgacgtggtggccgcggtgaacaactacgacttcggccacgacgtggagatcatcgccgcgtcggtgcgcagcgcgaaccacgtgacgcaggccgccctcatgggcgccgacatcgccacggtgccgttcgctgcgctcaagaagtgcgtgcaacatccgctgaccgaccgcggcctggatgcgttcatgaaggactgggagaaagttcagcaagcatgagcgaaaccgaagcaaccacggaggctcctgcggccgctcccgtcaagcgacgttccaccagcgtgaaggcgaagacgcagggcaaggccgagggcgcagccactccgggccgcaactcgtcggccacgcgcacgccgcgcaaatcggtgaaggcgggcggcgcgcagcagcaacagccgcagggcggttcgaacaaccgccgccagaacgcctcgaacgccggcaagcagaacaacggcggcagcaatcgccagaagcagggcggcggccagaaccggcagaacaacagccagaaccagcgtcgtcagcgtcgccagcacgacaacaaccgcggcaaccgcgaagtgcagcccagcgtgtcgcgcgaggagctggcgaagctcaaggtggccgagctgcgcgagaaggccgccgagctcaacctcgacgtgacgggcctcaagaaggccgagctggtggaggccgtgttcgaagccagtgtcaaggccgagggcttcatcgaggtgtcgggcatcctcgacatcctggccgacggctacggcttcctccgcacgcagggctacctgcccagcgagacggattgctacgtgggtctttccaccatccgccgcaacggcctgcgcaagggcgatctcgtgtccggtcagacgcgcccggcgcgcgagaacgagaagtacgccgccatccagaaggtcacggccgtcaacggcacgcccgtcgaggagctgggcagccgcgtgcgcttcggcgacctcacgccggtctacccggacgaatgcctcgtcatggagcacggcaagaacaccgtcaccgcccgcgtcatcgacctcgtgtcgcccatcggcaagggccagcgcggactgatcgtcagccccccgaaggcgggcaagaccaccatcctcaaggacatcgccgccgccatcagcgcgaacaaccccgaagtgcacctcatgtgcctgctcgtggacgagcgtcccgaggaagtcaccgacatggagcgctccatcaagggcgaggtcatctcctccacgttcgatatgcccaccgagaaccacatcgccgtgtccgagctggtcatcgagcgcgcgaagcgcctcgtggaatgcggcaaggacgttgtcgtgctgctggactcgctcacgcgcctcgcgcgcgcctacaacctggcgcagccggcatcgggccgcatcctgtcgggcggcgtggactccacggcgctctacccgccgaagcgattcctgggcgctgcgcgcaacatcgagcacggcggtagcctgaccatcctggcctcagccctggtggacacgggctcgaagatggacgaggtcatcttcgaggagttcaagggcaccggcaacatggagctcaagctggatcgcaacctggccgaccgccgcatcttcccggccatcgacccggtggcgtcgggcacccgcaaggaggatctgctgctggagccgcaggaggcgccgctcatctgggccgtgcgccgcatcctcgcgaacacgaacagcaccgaacgcgccatggacatgctgatcaagtcgctcaagcagaccgagacgaaccaggagttcctcgtgcgcacggcgaagaaggcccagcacacaaaggccgacggctcgctggagttctaggcgcgcccatccgtcatccggccgacaccgtgcgcgccggtcgcggtcttataatggaaaccaccagggaaccgcatccgttgggtgcggttccctgtcgcatacggtagtatggtcagacgcatgaaccaaggagggaccatgtctcaagacaacaactggcagcagcaggtgtggcagcagcctgccgcgccgcagcagcctgtcgcgccggccgcgccgtacggctacgccgtgcagcccccgaagaaaagccgcggctggatcgtcgccctcgtggccgtcgtgctcgtgttcgcgctgctggcgctgggcatgtggtcgtgcacgtcggtcatgtcctcgtcgttcgggtccttcggcacgggctccacggtcgacgacgtggactacctcacgggcgacgcggtcggcgtcatcgacatcgacggcaccatccagtacgacaacaccacctccagccccgaaggcctgaaggcccagctcgatcgcgccgagaagaacagccatatcaaggccgtcgtactgcgtgtgaactccggcggcggcacggctacggcgggcgaggagatggccgactacgtgcgcgggttctccgagcgcaccggcaagcctgtcgtggtgtccagcgcgtccgtcaatgcgagcgccgcctatgagatatcctcgcaggccgactatatctacacggccaagaccacggccatcggcgccatcggcacggtcatgcaggttaccgacctgtccggcctcatggagaagctgggcatctcggtggacaacgtcaccagcgccgacagcaaggattccagctacggcacgcgcccgctcaccgaggaggagcgcgcctactaccaggatcaggtcgaccagatcaacgagacattcatccagaccgtggccgagggtcgcgacatgcccgtcgaagacgtgcgcgcgctggccacgggtctcacgttcaccggcatgacggcagtcgagaacggccttgccgacgagatcggcaccaaggacgacgccgtggcgaaggcagccgagctggcgaacatcgcgcactacaccaccgtcacgctcaagaatcccacgagcagcctgtcgagcctgctcgacctcatgtcaaagagcaacgtttccaccgacgatatcgcccgagcgctgaaggagctggacaccgatggcagcatcgcccaatagcaacgaacgaatctcgtggcccaagcgcgccgtcgtcacggcgggcatgccctacggcaacaagccgctgcacttcggccacatcgccggggtgttcgtgccggccgacgccttcgcgcgcttcctgcgcgaccgcatcggcgcggccaacgtgcgcttcatcagcggcaccgactgcttcggctcgcccatcaacgagggctaccgcaagctggtggaggccggcgagttcgacggcaccatcgccgagtacgtcgagcgcaaccacgaggcgcagaagaacacgctggacgcctacggcatcagcctgtccatctacgaaggctccggcatggggcattcgggcgacgtgcatcagctgatcaccgagaagttcatcgagaagctgcacgagaacgggcacttgcagcgccgaagcacgctgcagttctacgatgcggaagcgggcacgttcctcaacggccgccaggtggtcgggcgctgccccgtgcagggctgcaagtccgagcacgcctacgccgacgagtgcgacctggggcacagctacgcccccgaggacctcatcgcgccgaagtcgtcgctgacgggcacgactcccgagatgcgcccggtggagaactggtacttcgatttgcccgcgttcgccgacttcctgcgcggccacgtggcggcgctcgaggccgaccccgaggtgcgcgccatcgtgccgcagaccgtcaaggagttcctcagcgcccccgtcgtctacatcaagaacgacgcccgcgaggcctacgacgccgtggcgggcgagctgccggcccatcagctgcgcgaggccgagaagggcaagcagagcttcgagatcgagttcgcctccatcgacgaccgcgacgcggcgcgcgaggtgctggggcgggcgggcatccgcttccgcacgggcaaggcgctcgtgccgttccgcatcacgggcaacatcgagtggggcgtgaaggcgccggtcatcgacgggctggaaggcctcacggtgtggtgctggcccgagagcctgtgggcgcccatgtcgttcaccatggccgtcaacgacaagatgggcctgccgcgcggcagctggcgcgatttctggtgctcggaggacgccgaggtgtaccagttcatcggccaggacaacctgtacttctacggggttgcgcagcccgcgctcatcgaggcgctgcgccctggcgacatcctgacgcccggcgtgaccgagcatcccatccgccagaccaccctcgtggcgaaccatcacatcctgttcggcgacaagaaggcctcgtcgtcgggctcggtgaagccgcccacggccgacgagctgctggactactacaccgtcgagcagctgcgcgcgcacttcctggcgctcggcctcgaccagaagtcggtgggcttcaagcccaagccgtttttggccacccccgaggagcttgcggacacgcgcgtggccgacccggtgctgaaagagggcgcgctgctgacgaacgtgttcaaccgcttggcccgcagctgcttctacgaggcgcagaagaacttcgagggctatatgccgctgggcgatgcgtccgaggacgtggtagcgaaggtgcacgaggtgctgcgcgcctacgacgagacgatgcaccgcgtggaactgcacaccatcatgtccatcatggacgagttcatccgctgggcgaacaagcgctggtcggacggcatccgcgaggtcgagaacacgggcgacgacgagctgcgccgccaggtgctcgtggactcgttcttcctgctgcgcatggcgacgctgctcatgcaccccgtggtgccggcgggcgccgagaagatctgcgactacctcagcttcgagttcgacgacttcttcagctggaactacgacttcgagaacatggacgagctgtgcagcgccggcgagatcactgaagcccgccaccgcatccgcgagctgcccccgcgcttcgacttcttcgcgaagcacccgagccagtacaagtaacgtcccgacagggggcgggccttcaacggggatgttttcgggatgaagagcgcccgtccgcggaatgcgggcgggcgctttcggttgacgtgcgttagggagggacgggtggttcgacgcgtgcgcagctatgggtggattgcgtgcagcaaaaacgccggtttggcagcaccggcccgttcggacgccttcttctcgggttcgggagcgttgttttgcggaatgcgaccgagcgccatctggagttttgtcgctgctcttcaccagtcgcggagtcgaggctgccaaaccggcgtttttgctgcacgcgagccggcgaaaacgtgcgcggccgttgcgtggtccgacagccgaggggcggagcaggttgccgggctgggcgcaaagagggttccatgacaatctcgaagcagtttcgacgtgccggtaggcttcgccaaaccgtataatcccaggtggtgaaaatcttgcgtcgccgccgacgtccgatccggccgccgaatttgtcatgggacccgttttgcgcccagctccgcctcgctctatgtcggatttgacacgtcagggttccaacgtgtcaaagcacccgtcctcttgacgcactgggtgctgccgttcgcccgcatggacgctcgcgacggtgtgggacgcaacatgaaaacgcccgcccgcatttcgcggacgggcgttttcggttggctcgaggttgcgtgctgcgaagggtttaggccacttcgaacagcagcgtcgccgcaagcggggacaccatgccgtcggcggttttcgcgcgcacggtcatgcggtagtcgcccttttcctcgaacgacgtggtgaactgccagttcacccacttgtcggccgtggcgccgtcggtgtcgcacgacgtccatgtgcggccgttgtcgaatgagaactcgatggcggcgatggggcttcccagatcgtcggccacgccttcgaacgtgatctcgtcgcctgccttgaacacgcagtcgtcggagtagttcatgatgttgatcttgttgcggtagcacgggtccacctgctgcacgtcgggctccgcatcctcctgcgtcagctcgatgttcacgatgtcgcgcgtgaagtagcgcgccacggtctcgggcatccacagctgcaggctcgacccggtggccgcctccagctcctggccgttcacctggtacgccagaagcgcgttcttctccagcgcgtagcgcaagggcagcggctggccgaagccgtcggcgccgtaggcggtgatggtgttcacgccgtcttccaggtcggccatctccaccacggccgacagcggcacgcccatgacggccgcctggccgaagggcgatccggtggcgcacgagcacgccatcatcgtctcctggttggcatcttcggccaggtcgcgcacgtcgatggtgaagttcttcttgatgttgccgcccacgttcacgtagaagttggccacgccgccctccacgtcgacgagctcggtggcaggcttcgagcacatgctggtcagcgctgttccgaacacgttgaacagctcgtcgttgggggtgacgccttcctggttgaaggtgaacgctccctgggcgttggccacggagacgtaggacacgtcgtcctcgttgaaccattgtgcggtcacgacgttgtctcccacggcatgcgtcgtggcgatcgggtccgcgtcggcggtctgcggtagtccggccgtagcgccgataccgcccactgctccgaacatcagcagcgcgccgccggccacgccgcccgcgatcttcttggggttgtaagccatggcgtcctcctactcgctcttctcgtcagatgccgccgcgaccttcggagggatcagcgatgcgctttccagcacggtcgtgtcctcggggttgggcatcttgtccttcgcgttgaacatgacggtctgggtctcgaagctcgtcatgccgctttcggtggtggcgcgaacggtcaggcagtacgcgccttccagttcgggcttgtaggtgaagctccaccacaccatcttgttgcgatccatgtcgccgatatcgtacttcgtccacgtttctccgcggtcaagggagaactcgacgcttgcgatcttctcgtcgtagccgtccacgtagccggtgaattcgtagggctggccgttctgcacgagcaggccgtcgggcacgccgaggatggtggcgttgggcttgttcatgggaacgtcgtcctcgttctgccatccgttcgggttgccggcccacttgtcggtgtagtcgatgtcctcgtcggtgacgtggtaggtgtcgatctgcttcgagttgatctgcgcgtccacgccttccacccagttcgtgcacggatagccgcgcgtcgcgtcgaggtactcgccgccgatcttgtacaccagcagcgcctcgtcggagtcgaccttgtccacggggaaggcgcgtttggagctgccgtcggcgcgcagcgccttcacgcccgtcgtgccgtccttgtagccgcccgccttttcgacgagccagctcacgggaatgccggttatctcggtgttcgtgactccgccgcctcccaccgggttccagttgcacaccatcttcgaggtcttcgtgatcacggcgccgtcggcctcggcttctttgatgagctcgggcagcgtggccgtgtactcggcgttcacgttgccgtcaacggtgatggtccattcgtcgaacaggctttgcggcatctccaggtcgaggccgttcacgcccgcgccgtggcgcatgttgtcgtagtaggcgtgcatccagtcgtacgagaacacgccgctctggccctgcgtcctctcttgatcgatcttgaaatcgccctgcacgttctcgacgtcgttgattccccacaggcgatcgtatttcgtgagatcccacagctccaggcccgcaccgttctcggtggcgttgtggcaggacatgcagtcgccctgatactggttgacgaagtcgctcttcgtgcgcgatccgtagtgaacggcgtgcatgagcgtgccgaactcgtactgcttcgcgatgtagcccggagcgtaggagtggcagaacaggcactgctgcagcgtggtcttgttgtccaactcgtcgttccaggcaaccgggtgctcgtagggcaggtgcttcagcagcgagttcatgtcggcatggcacgattcgcagccgcggttgtcggcgtccagccagtaggtgttgtacgagttggaaccggcttggatctgccaagcgtcggggttcacctcgtactcggtgggcgtgcgctgcaccatctgcccgttcggcagggtgcgcacttcgggagcgtattcggtcgcaacctggtcccagcggtcccataggttgtcgaggtattccttgccgggatagtagttctcgtcgatgtcctcgttcgtggtgccttcggcgccgtcgatgacggcctgctgctcgggcgtgagcttctgctcctgcgggacggcgcctccgtccccggacggagcggcggcgcctgcgttctccgactgctgcggcgcgcatcctgccgccaggccgagcgtgcaggccgcgcaggttgccacgatgatggccttcttgttgagcctcatgcatccccctttccttgtcttggttcccgtcgtccgccatgcgcgctcgcgcttcgccgtttgcgtccctcccttcttcctcttgcgtcgtcgatgcgcgcggaccgtcccatcgtaggatgcgggctgccgtgcgcgccatcgcccaagtatccgattcgcgggtcgtccgatgatttccgcatcggacactttggccgatgcccgtgcagagcggggtgattctgccggttcgggccgaacgcgccgttttttgagggtgcgggcgtgcgaagggcgtgcgataatgagaggcggtcgccgagcggtggcctgatgttggggaggcttggggaatcaccgatcatgggcaaccgcggtctgcaaatcaatccggtgggcgtgctcgcttcgtgcgggctggggctcaatctggtctggtgcacgttgatgggccacacgctgggcttcatgtcgtcaacagccggcatggatgcgtgggcgaatccgcgcctgttcttccttgccggcatccttctatgcacggcggcgttcgcgacggctccgcgtgcgctcaagcgcgccgacggcatgctgcgcttcgtgctgccgctgttgtcggccttcggcacggcgtgcttcggcatgtcgttccaccagaccttcttcgatcccggggcgctggccgtgggcggcctgttcgtggccggcgtgggctacttctggctggcggcgcgctatatgctgctgctcgcgcgcacgcagggctacgtgtgcgccgtcgccagcatagcgggcagtctggtgctcaagcttcccgtcttgctcgtgctcagcgcgttcgcaagccccgcagtgcaggtgatcgtcgccatcgccatgcctgtggccacggcgcttctgttcgaaacggcatgcactcttgcgcgcgatcgtgccgatctcgcggcaggggagggcgtttcggatgccgttgcgccttcgagggcggcttccgcctcggagggctctcgcgctcgtacggtgttcggcgtgccggccgtcccgcgcacgcgcgagcgcacgtcagctgccgaacgccgcaccatgctcgtgctgttggctattgcggcggtggtgctggctgttatccgctcggtgagctacctggggatgtggggcgatacgaacgcgaacatctccacggcgctgccgtggctcaccgccatgatcgttccggccgtctgcgtcgtggtgttcgcctacgccgcgctcgcgcgcctggccgatgccgcgttgccgatccgattccagcctgcgctgctgctcatcttggtgggtttgttcgtcgtagccatccaggcgaaccccacgggagcgtcgctcgggttcctcaccgtggtcatacagatcgacgagctgttcgcgcacctcttgttctggaccgtcgtggtaacggcgctcgacgtgctcgacgtgccgtcgtaccgcgtcatgggggtggccggcgtggtctatgcgggagcgtccatcgcctgggtgctgttgttgggacgcgcggccatcgtggacacgttgctcgtgatgctggcaacctacgctttcgtggtcgttgcgctgtgcgccgtttggttcgtgccgagtcgaaaggatgccgcttcgggcgaggtcgctgctccgctcgtgcagacggtgtcggacacgtgtctcgagctggcgggacgttatgcgctgtcgccgcgcgagaccgaggtgttcgtgcttctggcccagggccgcacgcgcgccttcatccaggacgagctggtgctgtcaggcagcaccgtgaagacccacgtctcccatatctacgccaagatgggcgtccacgaccgccaggagatgatggacctcatctggggctgacgcgtagaattcgatggcgaccgctctctcgtggtatgatacccatccggttttgcccctccgacgcgaaaggccctccacatgcatgtagatatatacaccgacggtgcggcgcgggggaatccggggccggggggctacggcacggtgctgcgcttcgtcgattcgaagggcgccgtccacgagaaggagctgtcgcagggctacgagcgcaccacgaacaaccgcatggagctcatggccgtggtggcgggtctcgaagtgctcaagcgcccgtgctccatcacgttgtactccgactcgcagtacgtggtgaacgccttcaaccagcattgggttgacggctggctcaagcgcggctggaagaacgcgcagaagcagcccgtgaagaacgacgatctgtggaagcgtctgctggcggccaaggagcctcacgacgtgacgttcgtgtgggtgaaggggcatgcgggccatcccgagaacgagcgctgcgacgagctggccacgacggccgccgacggcgcggggcgcattcgcgacgagggcttcaacggataagcgaggattccgaagctgcacccggctcacccgaggttcgtatgatgttcctgttcgatttccaagctgtttcgtaggcgagccatgcgatctgatacactagctcgcaatgtatacgagcatctgagcgcaggtggaggttcccacatgcaacagcaagcaatgcgcgcccgcaagggcgtgttcgcgggagcagtggctgcggccctcgcggcgactctcatgatcccttcgttggcgtacgccgatccgactgccagcgaaaagcaggctgaagctcaggccgcgctcgcatcgctcaacagcatgcagagtacgctcaaccgaacctccgtcgtctacgatgaggccttggccgcgcagagagaagccgaggccaagcgcgacgaggcgcaggcgcgcatcgacgaggcgaacggccagatcgccgaccttcaaacccgattgggatctcgtgcgcgcagcatgtaccgcacgggcggaagctcgttcctcgacctgctgctgggcgccaccaccttccaggagttctcgacgggttgggatatgctcaacaccttgaacgagaacgatgccgatctcgttcagcagacgaaagatctgcgtgccgaagtgcaggagcagcaggccgcctatgcagagcagcagcgcgtagccgccgagaaggccgatgaggcgctgcgctccaagcaggaggcggcgtccacgatgtccgccatgcaggctacctacgacagcctgagcgccgaagcggccgagctgctggagcaggagcgcgctgcgcaggcagccgccgatgcagctcaggcccaagccgtggtggaagcgtctgcgcgtcaggcccaagagaacgcgaacgcttcgggcaatgttgctccgggcaacgatccctcgccttctccgtcgcccgctccgagcgagccttccggaccctcctacaatcctgtgacgggcaatgctatcgtcgaccgggcgtacggttgcataggattgccatattcgtggggtggggtaggaccgagctcgttcgattgctccggcctggtaagctatgccgtgactggaagcttctcccgatggggaaccacgaacacgttcatgggcatgtcgcaggtaggtgatcctcaacctggcgatatcgccaccagctggggccactgcggtatctacatcggcaacggccagatgatccatgctccaaccttcggccagacggtgtgcatcagcccggtgcagggtgacatgatcatcgttcgcccgtagccccggattcctcaagcgaaagaaaacggcccttcggggccgttttctttcgggtgcatgctgtggcagcgcctaccgcacgctgttcttgatgagcgagcgcagttcgtcgatgccggtgcccttctccgacgagcacaccacgagcggcacgtcggcccccagcttcagctgcttcttcagggcggccttctgcttcatctgctgctgacggctgagcttgtcggccttcgtcagcaccacggcgaacggcagctcggcctcctgcaaaaagccgatcatgttcacgtcgaggtcggacgcctcgtggcggatgtccacgagcgaaaccacgagcgcgaggtcgcgatcctggttgaagtagccctcgatgagctccgaccagcggctcttgtccgacttcgacaccttcgcgtagccgtagcccggcaggtcgacgaagcgcacgccgtcgcaggagaagaagttgatggtggccgtcttgcccggcgtctgcgacaccttcgccagccctttgcggttgaacagcttgttcagcagcgacgacttgcccacgttcgagcgtcccgcaaacgcgatctcgggcatggtcgaaggcgtgagctgagacgatacgccgaatgatcgctcgaataccacgttgttgatgttcatgggacgctccttgcggccgtgctgttcgtcatgctcctcatggtacccgaaccgcgtcggggatgcgggcggaacccggcaaccccctcgcattccccacgggatgcgtcagacgcgcttgcgtcccgtgtacagcgccagcgccatgcaggcgaggctcgcccatgcccagaatcgatgctgcttcatgtccgacctccttcgcttcgatgtcgacgatactagttaatcatgattgactttatccgacaaccgcattatccttgataagttagattcgtgcaacttcaaatcgaagcgcgcggatggggaaccaacgagagagaggcgaagcgatgggattcaagaagaagagcgggctgctggtgggcgcgggctttctgctgggcacggtgggcgtgaaggcgctgaccagcaccaccgccaagaaatgctacgtgcagggcgtcgcgcaggggctgcgcgcgaaggcgacgtacgagaacatcgtcgaacaggcgaaggccgaggttgacgacatcgtggccgaggccacctacatcagcgtcgtcggcaaggacggggagcgccctgccgagcccgccgtcgaggccgacgaccagccggcgaagtagaacgcgatggactacgtcatcgcgagcgaggttcccggccgcttgcgcgtgcggctggtcggtcccgtgcccgccgacgatctcgacgcgctctaccgcgtgctgggcgcgtgcccggcggtggagcgcgcgaacgtctaccctcgcatcggcagcatcgccgtgcgctaccgtgcggcggacggcgcgcggcagcgggtgctcgatcacctggacgccatcgacgccgaggccatcgccgaagcccgttcgagctgcgggctcgaactggcaccgcgcacccagtcgctgctcatggacatcgcggtgctcgtggggtcgtacttcgcgcgccggtggttcctgccgaagcccgtcgcggccctcgtcaccgcctggcgctaccgcggcttcctggcggcggcggtccgctcgctcgggcgggcgcggctcgacgtgcccgtgctggacgctgccgccatcggcatgtcgttcgtcaagcgcgacccgcgcacggcgggtgagacgatgctgctgctgaacctgggcgagacgctggaggagtacacgcgctcgcggtcggagggggcgctcgtgaacgcgttgctcgacctcccggaaaccgcgcagctcgtcgagggcgaccaggaggtccaggtggctgcgtcggacctcaagccgggcgactgcatcgccgtgcgcaccggcatgcccgtgtgcgtcgatggcgaggtggtgcgcggcacggccatggtgaaccaggccgccctcaccggcgagccgctggcggtcgagcgcggcgtgggcgacaacgtgttctcgggcaccgcggtcgaggacggcgagatcatcgtgcgcgtgacggcggacgcgggcgagacgaagctgcgctccatcgtggcgctcgtggagcaggcggaatccttcaaatcggaaacccagtcgcgcatggagcagctggccgatcgcatcgtgccctggaacttcctgctggcaggcgccgtggcgctcaccacgcgcagcctcgtgaagacgtcggcggcgctcatggtggactactcctgcgccctcaagctcaccggctccatcgccgtgctggcggccatgagccaaagcgcgcaggcgggcttcaccgtgaagggctcgaagcacttcgaggccatggcggcggccgacaccatcgtgttcgacaagaccgggacgttgaccgaggccacgcccaacgtggcctgcgtgctggcgctcgacgggtggaaccgtcgcgaggtgctgcggctggccgcttgcctggaggagcatttcccgcacccggtggcccgcgccgtggtgcgcgcggccgcggagaagaaccttcggcaccgcgagcgccacgccgacgtggagtacctcgtggcgcacggcatcgcgtcgtcgctcgacggcaagcgcgtggtcatcggctcggagcatttcgtcgtggaggacgaaggcgtgtccctcaccgaggagcagaagcgccgcgtggccgacgaaacggaggggctgtcgccgctgtacctggcggtggacggcgagctgatcggcgtcatcggcatcgaggacccgctgaaggccggggtgcgcgaggccatcgccgacctgaggatgctcgggttcaagcgcgtcgtcatgctcacgggcgacggcgagcgcacggcggcgcgcatcgcggacgccgccggcgtgacggagtaccgcgccaacctgctgcccgaggacaagtacgccttcgtggagcggctgaaggcggaggggagcaaggtggtcatggtgggcgacggcgtgaacgacgccccggcgctctcgctggccgacgtgggcatcgccatggggcagggcaccgccgtggcgaaggaggtggccgacatcacgctgacgggagggcacctgagcgcgctcgtgacgctgcggacgctgagcgcggggctgaccgcgcgcctgaacgcatcgttcaaggaggtcatcgccatcaactcggcgctgctggcggcgggcatcggcggcctcatcacgccgcagacctcgtcgctgctgcacaacgcgtccacggtggcgctcagcgtgaggaacggcgggacgtaccgcgcctagcgtcaggccgtcggcggcgctgcgaacgcctcctcgaaggcatcgccgatcgacgcgaagccgtgcagtacgggctcgtccgagaacaggtcgagcagcagggagcgctgggcggccgggaggtcgaggtcgtcgaaccaggggagcttcgcgtgccgcctgctgcgcactgcggcggggctcgcgtacagcaggaacagcagcacgtcggcgagcccggcgcgatcggatgcggtcgcggccgggctcgccgcgttccggtcgaagaagccggccagcccgaagtcgacgagcgacaccgttccctcggcgtcgatcagcaggttcgccggccgcacgtcgccgtgcgccacgccgcggccctccaggtgcgcgagcgcgtcgatgacctggcggccgatggaggcgatcgccgcttggtcgaacgaccgccgttgccggaacagcaggcggtcgagggaggtgccgggcatgaggctttgcgccatgaagcagcgcccgcggtcgcgcgcgtcgtcgcgctcgcgcacgatgccgagccagcgggggacggcggggtgcgcgcacagcgacagcgccttcgcctcgttccagagggcgacgcggtcgagggacccctgctcgggtttgatcagcttgagggccgcgctgcggggctcgccgcttgcgcgcgaggcgcgaaagcacgtgccgaaccggccttggcccagcacggcgtcgagccgccatgcgccgaacgtgcggccgacgagcctgcggtcgccggccgcggtggcgaagcgcgctagccgcgcggcgtgccgcattcggggcagaacttcgcgctgggaggcagcgtcgcgccgcattgcgcgcagaacccgccgcccagcttctcgccgcattcgaggcagaacttggagcccgccggcacctgcgcgctgcacttcgggcaggaaagggcgcctgcggccgaggcggcacgcggagcctgcgcctgcgcttggggtgcggcctgcgcctggccggggatgggctgcgcgttctgctgggggtagccgtggccgtagcgcttgcggtccgagctgctgaacgagcccacgaagccgccgagcttgcccatgaatccttgcggttgatagtagccgctgccttggttggtgcggtgctttttgcgaccgctcatggagaagagccccatcgggtggtcctttcgatcaggtgggtagctgcgccccaggataccggatgcgatcgggctccgccgcttccgccgccgactcccggaaaaaaccaaggggcaccgcttcgcttgccccaagcccgtccccaagctccaactctcaatgcaaccaagtatctgtcaatgacagccgggcatgcgaattcgcccatgctaaccatttttttcgttttgcgcgcgatttggcgcttcgaagcgtccttggacaccgatcctcgaaagtggtttttacgtttccgcaggtcgcgtgattcgtgttcgatcgctacgggtcagcatgtcccctaaacgggacaacgcgcacccctgaacgaatgcaaaacgaaaaaaaatggttagaactcgacgtttcgcgtgccgcgccactattgacgtgaaccgtcgttcacccgttgatcagtgtgctctatttcggggcaacccgtccgcaagcctcttcaccaagctagagcgtacccgtaggagccgcttggtatgcagccagatacccgtcaatggtggttgaacggcagaccttcggctgtatgaccggagcgttgcgtgttcggaacgcttccggggccggccttttccgccgctacacttgaagcgtccgtcgccgcgccgcgtcgggcgcaacgaggaaacggacgaggaagggcggtcggatgggcaacgcgaagaagcgaagcggaagcgtggcgagcatgctgcccgtgctgctggcgtgctcgttcacggcctcgttcggccagagcatgatgaacgtcgccctgcccgagctggctgagcgcttcggcgtcacgctctccatcgcgaactgggtgatcgtggggtacatggtggtcgcggcgacggccatcatgctgtcggcgttcatgctgaggcgcctcgggctgaggcgcgtgttcttcgtcggcgcgggggcgctcgcgctcggcagcgcgtgcgcgctgctctcgcaggacttcccgatgctgttcgccagccgcctcgtgcaggcggtgggcacgggcctgttcttcccgtcggtgacgagcgtcatcatgacgaactcgccggccgcggtgcgcggcacgcgcctcgcgctgaacagcggcgtcatcgccgtgggccttgccatcagcccgacggcctcgggattcgcgctcacgcagttcggctggcgcgccatgttcgtcgtatcgctcgccatgtccgtcgcgctgctcgcggtcggcttcttccgcatccacggcggcccctcgacgaagcgcgttcccatcgacgcgctcagcgtgatgctcgggccgctcgggttggccgcgttcctgtacggcttgggcgaggtcacgcgcgatctcgccccctccctcgcggcgctcgcggtcggcgcggtgctgctcgccctgttcgcctggcggcagttcgcgttggagagcccgctgctcgacctgcaccccctcgtccacccgcggttcgccgtgggcatcctgctcgtcatggtgggcatgctcacgtcgttctccatgagcatcctgctgccgctgtactacgagggggcgctggggtacacggcgttcttcgcgggcctgctgctgctaggccccgtgctggtcaacgcggcgttcacgtttttgggcggccgggtgttcgacaggcacggcgcgtggccgctcataccggcgggcctcgtgctcgtgctcgtcgggcaggcgacggcgttcttctcggccgagagcatgatcgccatcctgatcgtcctgtcgtcggcggccgtgtacgcgggcgccgggttcgtggtggcgccgtccaagaccgcggcgctcggcacgctgccgcccgcgacgtactccgccggcgcgtccatcaactccacggccgtgcagatcgcctcggccatcggctcgtcgctgttcgtcggcgtgctgtcggccgacgtgctcagggacacggcggcgggcgcggcgaaggcgtcggcgtacgccgcggcgttcgagcacaccctctcgatagccgtcgtcatcgcggcggcggggctgctcgtcgcgttcttctacgcccgcgccatgcgcaaaccggccggtaagcagcggtgacaacttccggttgtcgagaaaaaccgtgaaaagcatccgaaagttggttgagggaaccgcggtttcggtgcatgctgtagagagaaggcaagcgagaggagaatcctatgagcttccgagacaacctccagcatctgcgcggaacgcgcgatttgagccaggcgcagcttgcgacgctgctcggcgtgagccgtcagtccgtggcgaagtgggaagccgagaaaagctaccccgagatggacaagctcatcaagctgtgcgacctgttcgagtgctcgctcgacgacctcgtgcggggcgacttaaccggctgcgcgacggcgaacgaggcgatcgtggaggccgagccagcctccgcagccacgcctgtcgataaggatggctacgacgagcacatgcgccgtcgtgcgtgggacgtcgctgcgggcgtggcggtgatcgtcatgagcttcggggtggcgatgttcgtgacgggtggcggttacaacagcacgacggtttcggcgaacatcgtcgtccacctcgtagggatcgcgctcggcctgtgctttttcgttccggcgtatcgcagccatgcggcgtttcgcaaggagtatccggtggtcgaggactgctacacgccggaggagaaggcggaagcgcgccgtcggaagctgttcggcgtcggcggcggtgtcgcgctgctcgtcttgggcatgttcatgcccggcatgctccaatcgattcagatgttctcgttcgtgccgttggcgctgttcgcttgcttcgccgccgcggccgctctgctcgtccactccgtcatgatggatcgccgcgtcgacgtgtccttctacaacggcgcccccgatttcacgatccaatccctccttcgagggcgtcgtactgacgcctgatctcgtcgcgcagctcgtcttcggcttgaacgtgggcgccgccgtcggccggccgtgaattcgccgtatccgctcgcagttgtgggcaaccgcgcacaactgcgtccttttgcgctttccgcttgcaaacgctcgggggcgtggtatacttctgcagtttctaaatacgcatgcttgcgcgacccgatccgctagtggccaactgaaaaaggctgcggatctcggggatgaccgcaagcagaggactaacgaatggagagagtcatgacgaaagtcagcattacttcgctgctcgatgcgggcagccacttcggccatcagacgcgccgttggaaccccaagatgaagccgtacatcttcggcagccgcggggacatctacatcatcgacctcaagcagacgctcgtgggcctcgaccaggcgtacacgttcgtgtccgagctggccaagaagggcggcaccgtgctgttcgtgggcacgaagaagcaggcccaggaggccgtcgccgacgctgccaacaagtgcggcatgccctacgtgaacgctcgctggctcggcggcatgctgaccaacttcgtgaccatccgctcccgcgtgaaccgcatggaggagctggaggccatggaggccgacggccgcatggccgtgctgcccaagaaggagcagatcctgctgcacaaggagctgtccaagctgcagacgaacctcaacggcatccgcaacatgaagcgcacgcccgacgccgtgttcgtgatcgacacgaaccgcgaggccatcgccatccatgagtcccgtcgtctcgacatccccgtggtgggcacgctcgatacgaactgcgatccggacgacgtcgatttcggcatccccgctaacgacgacgccatccgctcggtccgcctgctggccgacttcatcgccgacgccgtcatcgccggcgtgggcgtgccggtgaccgctgccgacatggctgcgcccgccgaggctgccgaagccgtcgccgaggccgccgtcgagaccgctgccgccgaggttgccgtcgaagccgtcgccgaggctgccgtcgaggccgctgcgcctgccaccgaataagctgcttcgcgcatctaccgcactgaacgcgccgccccgctcacccagcgcggcggcgcttgacaccccgccgcgtcccaaggccgcggcatcgtgagagaaaggatcaacgtggctgctgttaccgcttccatggtcaaggaactccgtgagatgaccggcgctggcatgatggagtgcaagaaggcgctcgtcgaggccgacggcaacatcgaccaggccgtcgacgtgctgcgcacgcgcggtctcgccgccgtcgccaagaaggccggccgcgccaccaacgagggcaccgtcatggccatcgtctccgacgacgccacgtccggcgccgtcgtcgagctcaactgcgagaccgacttcgtgggcatgaacgacaagttcaaggcctacgccgagaagatcgcccaggccgccctggcctccaagccggccgacctcgaggccctcaaggccgccgacgccgcaggcgagacggtcgaggccgtggtgaccgacgctatccacacgctgggcgagaacatccagctcgcccgcttcgcggtggtggagggcggcgccgtgtcgtcctacatccacggcggcggcaagatcggcgtgctcgtgcagttcgacgtcgagggcatcgaccccgcgtccgacggcttcaagcagttcggtcgcgacgtggccatgcaggtcgccgctgcggctccggtcgccgcgacgcgcgagtccgtcgacccggccatcgtcgagcacgagaaggccatctacatggcgcaggccgccgagtccggcaagcccgaggccatccaggagaagatggccaccggccgtctggagaagttcttcaaggagagcacgctgaccgagcagcccttcgtgaagaacccggaccagtccgtcagcgagtacgcggctgaggtcgccaagaacctcggcggcgagatcaagatcgtcgacttcaagcgcttcgtgctgggagaatagttttgttccggcggcctgacggccgtcggaaccgctcgacgctgcgaagccccctcgcaccgatcctcggctcttttcgcttgtcttcgcgtaccgaagtacgctcagccgcgaaacgagccgactatcggcacgagggggcttctcgctgtcttgctgcgccaacctgcgttcttcgtttcggtaccagcagctatcggcccttctgctttcgttgtgatgatggtgggcgcgcagcctccctgttcttataatggtgggtaccgcgaagggcgcctcggacggcgtccgccacccaatgaaaccaacgcccggaccctcgtcgtcgcgggcgcggaggatgcttccatggctgaagagatcatcatcgtacagggcaacaacacgctggccggcgacgtcgccgtgtcgggcgcgaagaactcggcgctcaagctgatcgccgccgcgttgctgggccagggggaaacgaccatccataacgtcccgctcatctcggatatcagcatcatgtccgacgtgctgcgctgtttgggcgcgcgggtggagcgcgacggccatacgctgacggtggacacctccgccgtcgacaagcacgagaccccctacgagctggtgtcgaagatgcgtgcgagcatctcggtgctcggcccgctcgttggccgcttcggatgcgcccgcgtggccatgccgggcggctgtcagatcggcgctcgcaagatcgacatgcatcttgtcggcctcgaggctatcggcgtggagttctccatcgaccacggcttccttgaggccagcacgcccaacgggctgcacggcgcgcacgtcgtactcgacttccccagtgtgggagcaaccgagaacctgctcatggccgccgtggcggccgagggctccacggtcatagagaacgccgcgcgcgaacccgagatcgtggatcttgcgaacatgctcgtgtccatggggacgcgcgtcacaggcgcgggctcggacatcatcgaggtcgagggcgtgccgctttcttcgctgcatccttgcgagcacacgacggtgggcgaccgcatcgaggccggcaccttcctggccggaggcgcgctgacgggcggtcccgtcaccgtgcacggcatcgatccgtcgtatctgcgcgttgcgctcatgaagctccgcgccatgggctgcgacgtggagacgggcgacgactggatcaccgtgggccgcacgcgcccgctggctcccatcgacttgcagacgctgccgcatcccgggtttcccaccgaccttcaggcgcagttcatgctgctggccgcgttcgccgacggcatgtccgtcatcaccgagaacgtgttcgagaaccgtttcatgttcgccagcgagctcatgcgcatgggcgcggacatcgccatcgaggaccatcacgccctcgtgcgcggcgtggacgtgctgcagggcgccgacgtgtcgtccaccgatctgcgcgccggggcggctctcgtgctggccggcattgcgggggagggcgagactcgcgtgcacaacatcggccatatcgatcgcggttacgaggactacgtgggcaagctgcgcgctctcggcgccgatgtcgtgcgcgctgaaaccgagcaagcccagacgtcccggtagcgagctcccatggtcaacaaacgcaagcagggcctgacgcaggctcgtgcgaaacttacgtcgcatcgcatgaggtcggcaacggtcggcacccatgtgccgcgacgctcgtcgcgtcatatgaacggcgaggcggtgggattctccagcccgcgcaaaaggaagcgcgcggctcgcggcatcgtggaaactattctgcccgtcacatcgtcgggcgagagctcgtcgcaatacgcccgtcgcgtcagccgtcgcgaattcgcccaggacatccaacgtaaggcgcgcatccgccgcatcgtcgcgatcgcggtctgcctgctcgtggcggttgccgtcgccgccgccgtcggcgtggcgacgttcttcgggtcgctcgatgcgaagctcgggctcaaggattccgatgcagcgtcggcgctcgttgctcccaaggccgatgcgaaggcgttctacacggtggtgtcggccgacctcgatgcgccgggctcggcgaatgcgacggacggccccgacgccatcgcgctggtgcgcgtcgacgaggagacccgcgccgtcaccgtcgtctcgattccgcctacgctgcaggtatcgctgaaggacggcaagaagcacccgctgcgtgaggcttcgacgcaggagggcgatgccgcgctcgtgtcggccgtggccgacttcgcaggggtgaacgtggctcattacgtgaagaccgacgccgaatccatcgtgcgcctcgtggacgtcctcggcggcgtcgaggtgaacgtggccgaggaggtggacgacccgaacgcgggcgatgcctacctgccggcgggcgcccagacgctcgacggcgcgcaggcgctcacgtttttgcgcgccagcaacttctcgaacggcctcgaagtccaggcggcgaaccagcgcgagctgctcacggcactgtcgctgcgccttctgggggaagggcggctgagcttcctcgccacgctcgacaacgtgggagggtcgttccagaccgacctttcggctgcggccgcgctttccgtcgccgatgcgcttcgcggtgtggactcttcctcggtgtacggggcgcttgtgcccggctacgagaccgcgcgcgatggcgcgagctcgtatgcggtgtcttccgatgcctggaagagcatgatggagctcgtggcggccggttccgagcccgtggtggagcaaacggcgccccaggtggatccgggcagcttcaccatcaccgtacgcaacggctcgggcgtgacgggcggagccggccagatcgccgacgcgctgaaagaccgcggcttcgacgtgaccgagacgggcaacaccgacacgtacgtttacgacgagacgctcgtcgtgtacaacgacgacgcgttcgaggcggcggcggaaaccgtggtggcatcgctcggcctgggccgtacggtgcccggggcgggtttctacacgttcgataccgacgtgttggtggttctcggcaaggattggaagcccacatcgtagactgtggtagaatcggcacctgaaagcaagatgttcaagttcaacgaaggagctttaccatggtagacaagaacgatgtggcggcggtgctcgagctcatccgccccagcctgcaggcggacggcggcgatgtgcgcctcgtcgacgtgaacgaggacggcgtggtgtcggtggagctgcagggtgcctgcaagggctgccccatgtcccagatgacgctggccaacggcgtggagcgcatcctcaaggagcgcgttcccggcgtgacgaaggtcgttccggccgacctgtaaaccggatcgatttcgaaggcgaaggaggcggatatggcgcagtgttgggaacgccgcgggtgcgacgaggagatgatgtcgcgctgcccgcacaacatcccgggcgagccgtgccctgccgattgccgcttcgccgcatgcacgcgctcgacgcacgaggtgtgccaggatttcaacaagctgctgaatcccgagcgcgattacgacgcggccgtcaaggaggtgtgtcgcttctgcgagcacttcctggagcacggccctggcgtggccgagcgcactggcgaagtcacgaggcagggcaatccgaaccggtttctgctctagcagggcgaaccggttcgaaacgcgcgcatccgcgaggagcgcgcgacaatcgcagcgagcaaccgcggccgtgcaggacatctgcgcggccgcgcgctacccccataccagcaaagaaccgacgaaagggagacgatggcagagcaggctcacggcacgctgaaggtgaagaccgggttcgcggagatgatgaagggcggcgtcatcatggacgtcgtgaaccccgagcaggcgaagatcgccgaggacgcgggcgcggtggccgtcatggctctggagcgcgttcccgccgacatccgcgcgcacggcggcgtggcccgcatgagcgaccccaccatgatcgagggcatcgtggaggccgtgtccatccccgtcatggcgaagtgccgtatcgggcatttcgtggaggcgcaggtgctgcagagcctgggcgtggacttcatcgacgagagcgaggtactcaccccggccgacgacgagtaccatgtgaacaaatgggacttcgacgtgccgttcgtgtgcggcgcgcgcaacctgggcgaggctctgcgccgcatcgccgagggcgcggccatgatccgcacgaagggcgagccgggcacgggcaacgtggtggaggccgtgcgccacatgcgcaccgtgaccaccgacatcgcccgcatcaagggcctgcgcgacgagcagctgttcacggctgcgaaggacctgcaggcgccctacgagctggtgaagtgggtggccgagcacgggtgcctccccgtggtgaacttctcggccggcggcatcgccacgcccgccgacgcggcgctgatgatgcagctgggctgcgacggcgtgttcgtgggcagcggcatcttcaagtcgggcgatccagccaagcgcgcccgggccatcgtggaggccacgacgaactacgacgaccccgacaccatcgcccgcgtctcgcgcgatctgggcgaggccatggtgggcatcgagatctcggacattcccgagaacgagctcatggccggccgcggctggtaaggcgggttccggcggcttgccagccgccggaactgctcgacgctgcggcgcaccgaggtgccccgccttcgcgcgatgtcgaaggtttgcgtaccgaagtggcgcctccgccatcccacgaattcggggcgcctcggcgcccctcgctgacttactacgccaaccagggaggtgtcaatggaacctgtgagaaagacgatcggcgtcctggccttgcagggcgccttccgggagcatcggcggatgctggaaggcctgggggccgacacgcgcctcgtgcgctggccatccgagctggaaaggctggacggcctggtgatcccgggcggcgagtccacggccatcgcgaagcttctggccatccacggcatgtacgggccgttgcgcgccgcgcatgcggccggcatggccgtgttcggcacgtgcgccggtgctatactcatggcgcgcgacatcgagggggcccgctccgaccaggagccgttggcgctgatggacgtgcgtatccgccgcaacgcctatgggcggcagatcgactcgttcgagacgacggtgccgtgggcgggcatcgagggcgacccggtgaagggcgtgttcatccgcgccccgcgcttcgccgatctcggcgagggcgtggaggtgctcagcacgtccgaggacggcgagccgctggccgtccgcgaaggccgcgcgctggccgcggcgttccatcccgagctcaccgacgattcccgcgtgcatgctttcttcctggagcgcgtcgtcgggtcgtgaggagcctctcctgcgttgccggggcgtttccaatcgcgggagcgcgctcgacgagttctgctacaatgaagacgaaggaaggcgggcgacgaagcgagaggagcgtgaacctatgagcaaaggcgtgacctgtcctgcgtgcggggcggtcggtttggacgtgtgccgttatgagtccatgatggtggtgcgcgccgatctcgcgatgttcacgctgcgctgcccgcactgcaaagccaccgtgtccagcatgcagcccattccgccgcagctgtacgaggaggtgcggttcgccgccctcgaagtgggcgccggcatgggccttgagtagcggttccgtcggcatcgtgccggcggaacttttttctatgcggttcgaacgacaaccgaatgcccgtgccgcgcgggctgcgaaggaacgacatgctcaacgacatctaccaatccatcgatcccgtcctgttcgcgttcggcccgttcaccgtgcgctggtacggcgtcgcctacgtgctgggcttcgttttcgcgggcctcgtcatctggcgcgtcgcgcgccgctggcgcgtgcgcgtggatgcggattcactgctgaccatcatgttctgcgtcatcataggcgtcatcgtgggcggacggctgggttacgtgctgttctacggcgaggggtactatttccagcatcccgagcagatcctcgcgttcaacaaaggcggtatgagcttccacggcgggcttataggcgcgcttttggcgggcatcgcggctgcgaagctcactcgtatcccgtacctcacgttggccgacctcggctgcatcggcgcgccgctgggcctgctgttcggccgctgcgcgaacttcatcaacggcgagctgtggggcgcgcccaccgacgccgcctggggcgtggtgttcggaggcgccgcgggcacgatgccgcgccatccgtcgcagctttacgaggcctttctcgagggcgtcgtcatcttcgccgtgctgtatctgctgtcgcgacgcatgccgccgcgtccgcgcggcacgtttctgggcacgttcctcgtcatgtacggatgcttccgcttcctcgtcgagtttgtgcgcgagcccgacgcgcagctgggctatctatggggtggctggcttaccatggggcagctgttatcggtgccgctgatcctcgtgggcgccggcgtgctggtttatgcgcttgtcgtgaaaaagccccaaaaagggcttcctgaaatgaaacaatctgagtaacatataagggaatcgaacgcacggctcctcgaggcttcgactcgctaagccgtgcgattggttacggttcggcggcaaccttgcctgcggtaacagtttgcttgccgggcgaagctaaactggcaacagatcatattggctgcaagttttatcagacgacgaagggggacttcccatggatctcaagttctacaagtgcatgcactgcggcaacatcgccatcaagccgttcgacgcgggcgtgccgctggtgtgctgtggcgagaagatgaccgagctcactgccaataccaccgatgccgcggtcgagaagcacgtgcccgtggtgcgcgtcgacggctcgaacgtgcacgtcgaggtgggcagcacgctgcatcccatgactccggagcactacatcacgttcatctgcctggtcacgaagaacggctaccagatcgtcgagctgacgccggaggatgctcccgtcgccgacttcgccattgccgaaggcgatgaggctctcaaggtgtacgagtactgcaacctgcacggcctttgggtcgctgaggtgtagacggccctgcgtttcgcgcatgacgcgcccgtcccgcttcgcggggcgggcgttttcgtttgcgttgcggtcggcgcgcgtgttaccgctgcggatgtttcacgtgaaacatttgtgctgaatgggcgtttaggcactcgttcggtcgcgtttggcgttttgcccgcgcggcgcggctgcgcggggttcgcaccatgcgtcgcgcttgccgcccgagcggcccatccccgcatccgtctcgcccgcgcgccatggcctccgagcttccgacggctcctcggatggcgaaaaagcatcgaattcggaagtccccgacggtgctgcgggttcgtcgggaggcctcctcctgtatcgctcctgttcgcgggcgtctcttctttcgccgccgcgcgcagggtctcatcggggcgctcgatttcttccgaattcgatgctttttcgccatcaggggagcctccgtgcgtctgcaagctgcttgggaggtcgtccgacggggcgtgcgatccctggggcgagacgtttctcgggaggtcatgcgccaggcgtgcggtcgggacgtctgctcggaagggaagagcatgcatgccgccatcctgagttagcggatctccgttcgccatcctgggcgcgcgcaagcgagtcgaaggatctcgcgcagcgcgcgaggatccgaaggcggcttcgaagcccgttgccgctcggagacgccgcgcttgtgtgcagactcgtcggattggggtggcgcgacgggggctcgcggggatttcacggtatgatggatcccatggaacgggcgcgatcgaggaggagcatggcaagacgcacgaagatcgtttgcacgctgggacctgccgtcgacgacgagaccgccctgcgcgggctgctgtccgcaggcatggacgtggcgcgtttcaacttctcgcacggctcgcacgacgaacaccgggcgcgcatggatctgctgaaacgcgtgcgtcgcgacctcggctcgccgtgcgccatcctgctggatactcgcggccccgagatccgcacgggctcgcttgcgggcggacgtcccgtggagctgcgggagggcggttccctcgtgctcaccgagcgcgtggtggacggcacggcgcagctggtctcgcaaacctgcgcggggttggcgcgcgtcgtcgggcccggccagcccatcctgctggacgacgggctcatcgagcttcgggtggaggcggtcgaaggctcggacatccgctgcacggtgcgcaacagcgggctgttgggcgagcgcaagtccgtcaacatccccggcgccagcgtgccgctgcccgtgatgaccgaccaggatcgggccgacctcgtcttcggcatcgatcaggatgtcgacttcgtagcggcctcgttcgtgcgcaacgccgagggcgtgcgcgagttgcggcgtttcctcgacgagcacggcggcgagggcgtgtgcttgatcgcgaagatcgaatgcgccgaggcggtggagaacttcgaggacatcatcgaagcggccgacggcgtgatggtggcgcgtggcgacttgggcgtggaggtgccggctcacaaggtgccgcacatccagaaggagatcatccgcgcgtcgaaccgcgcgtcgaagccggtgatcacggcaacccagatgctggactctatgatacgcaacccgcgtcctacgcgcgccgaggtgggcgacgtggcgaacgccatctacgacggcaccgatgccgtgatgctgtcgggcgagacggccggcgggcgctacccggtggaggccgtgcgcatgatggcgcgcatcgccgagtcgagcgagccctacttgttcgacgagcgcgcgcccgaccgcagccgcgacaaggcgcgcgtggcgctggccgtagggctggccgccgtgcagacggccgagaacgtgggcgccgcttgcatcgtcgcgcctacgatgtccggtcgcacggcgcgactcgtgtcgaacctgcgcccgcgcgtgcccatcctcgcggtcacgccgtttccgcgcgtcatgcgccagcagcagctcaactggggcgtgacgcccatgctcggcgatgtgcagggcgacatgcgccacgtcgtcgagcaggcgcacgacgccgtgttggagaacgggctcgtgcgaccgggcgagctggcggtgttcacggcgggcgatccctccacgagtcccaccatcggcgagccgggcgacggcgcggcggccgccaccaacgtgatgtacgtcgtgcagatacgtcccggcgaaggcgacggcgggctataggccgcggcggacggtgccggccgtatgcggcggataacggacgataggcttcggataaggagttgaccatgggtttcttcgacaatgcgcaggaagtgctcgaccgcggcgtgtcggcggcgaagggcgccgtctcgggcgtggcggtggagcagcaggcgttcgtgaaagggttcgctcgtctgtgcagcgagggctcgagccagggatggcatgagagcaacggcggcaacgcgtcgtaccggcttgcgccggaggacgtggcatccagccgctcgttcttctacgacaatcccagctcgtgggtgccgctaggcgtgcaggtcgccaacctgggcggtgagttcttcctggtgacggccgcgggagcgcacatgcgcaacgtggcgctggaccccgacacgggcgcgggcatcgtggaggtcaacgccgcgggcgacgcgtggcgcatcgtgtggggtttcaagaacggcggcgtgcccacgagcgagttccccagccacgcagccatccagtcggtacgcagggaggcgaccggcggcacgggccgggtgctgtaccacgcccatcccgcaaacgtggtggcgctgaccaacgtgctgccgctcgatgcgcgcacgttcacccgtgcgctgtggaagatgctgatggaggccatgatcgcgtttccgaagggcatcggagtagtgccgtggatggtgccgggcggccctgagatcgccagcgccacggccgacgccatgcgcgtctacgacgcatgcgtttgggctcaccacggtctgttctgcgctgggaacgacttcgactcgacgttcgggttggcgcagaccatcgacaaggccgcgaccgtctacgcgcaggcgcgcgcgatgaacggcggcagcgaccggttcgccagcgccattcccgacgagggcctgcgcggcatcgccgaggcgtaccatcttccggtgaacgaggcgttcctcgcttaggttgggaatttccggagaaaacgcgtgcgttgcggcgtcgactgtgctatagtgcaaaggcttgtcttcgccttggtcggaaaccaaggcccgtaaaggagaaccataatgaaacagggtattcatccggagtacgtggactgcacggtcaagtgcagctgcggcaacacgttccagacccgttcgacgaagcctgagctgaagatcgacatctgcaacgtgtgccatccgttctacaccggccagcagcgcttcgtcgacaccggcggacgcgtccagcgcttcgccgacaagttcggtgccgcgaaggagaccgttgctgagcgcgaggccgccaagaaggccgcgcgtgccgccgccatcgccgaggccgaggccaagaagaaggccgagcgcgaggcgaaggccgccgagaaggccaagcgcgccgaggagttcgccaagaagtccgaggccgaggctaagaaggccgccgaggccgaggctgccgccgagaccgcgcccgaggctacggccgaggaggccgccgcggtggacgctctcgtcgaagaggctcctgccgccgaatagcgcttctgctgcaagcacagcgaacgcccggtcgatgaccgggcgttcgtgcgtccagggacgatccgcgcgcgttgtcgcccgaaagccgtggttttcgccctcgaagcgcggctttcgggcgacaacggcatcggcggggccgcttcaggcgctccctagccttgatcgacgaactcctcgccgcgcagcaactccacgtccaaaaggtcgccttcggcccatcccgcttcgccgaggggcgagacgcgctgcgcgttcgacgtcatgcacgcggccagctccccggctttgaaatcgaggaagtgtgccgcgtagccctcgtcgtcgcgcgtcacgtgtacgcgggctatgttcgccatcttggggatgctcgtcttcgcggcatccgcccgcgcctgcacgacggggcggcggcgcagcggaattcccaggatgcgcgccgtgatcgcttgcaggcaccattcggagccgaagtaggcggccatggtggggccgggcagatcgacgaccggtttgccgtcggctacggccagcatgagcggccgtcccggcacggcggcgatgtaatggtgcaccacctgcccgcggcgttcgatcagcttcacgttgaaatcctcctcgccgagggccgatcccccgttgaccaccacgacgtcggcggtggcgagcgccgcctcgaaggcgcgttcgagctcgacgggatcgtcgtgcacgagggggaacaccacgggttcggcaccgtactcgatgaggaggtgcttgcacatgaggctgttcgtgtccacgttttgacctcgtcggggcttgatgcctgcgggtacgagctcgctgcccgtgggaatgaacgccacgcgcggtttgacgcgcacgggcaccatcgtggcgccgcccatggcgagagcggccaggtcggtgggtcggataatgctgccggcgctcatgagcggctcgcccgcgcgcagcgtggagccggcgggccgcacgcccgaaccgggctcgacggtcacgtcgtcgtcgaacgttaccgatccgtcctcccgaacgaccgccttctcgatcatcaccacggcgtcgaacgcgtcggggaagtcgtctccggtgtcggcgcgcacgtaatccacgccgggcttccagctgcttgtgtcgggcatgccgttcgcgaacgctgccgacttcaccgcgatgctgtcgaacgacgaggcgcgcaccaccggcagcgtgttcgtcgacgccaggtcgcaggcgagcacgcgtcccaccgcgtcgtcgagcgccacgtactcgacgctcctcgccggctcccatgctgcgaagaagtcggccagcgcctcttcgcgcgacgggaaaccgtccatgatcttctctcccatatgcatctcctcgtaccgtttttcgttgatcatagcaggaaagcccggcgcgcgccgggctttccgtggacgtgcgatcgatgcggtgccctatgccttgggctgcgcgttcgcggcgatctcgttgaactcggactcgctcaggtcgtagccgtagaacgtcttgaagtagcctgcgaccgtcttgtgcaggtcgttgtcgtactgctcggggtacagcaggcgcggcagccactgcatgcccagcacctggttcaccgtcggcgggctgttcagccagttccacggcgtgccgggcaccttgtagtaggagccgttcttgacggcggacaggtcggcgaaggccgcatcggagcccaccgtgtcgtagatgctgtccgggccgaacaggatgaccgcaggatcccagatagccagctgttccatgccgatctcgacgccggcgccgctgccggacaccttgcccaggtcggcgacgttgtcggccacgaggtcgatcacctggccctggtaggagttcttcgcgatggtgttcgtccccttgtcgccgagcaggtacgccaccttcgcgcggtcgccctcgggaatcttgctcatgacggatacagtctcgtcgtaggcggccttgcagtagtcggacagctccttgccgcgatcctccatgcccaacagctcgccgagcttctcgtaggctgcgccgtagtcctccatcttcgtctcgatgaccactacggggatgcccagctgctgctgcatcgtgtcgaggtcctctttcatgccgtctttgatctcgccggtgtcgatgaggatctgcgcaccggatgcggcgacggcctccttgttgaggtcgcctttcgctccgaacgcggctcctgtcacgggcaggttggcgtagtcgcctcccaggtacttcgcctggtcggccgtgagctccgtcgagatcgtcaccagcttgtccggtgccatcgtaagcaggacctgcgtggcggtgtggcccgccggcgcgatgcggtcgatcttcgcgggcacttccaccgtgcgtccggccgagtcggtgaacgtgcgcgtctcgttctgcgccgcctgatcggtttgcgcggcgccgtcggcgctttcgggtgcgttctgcgacggagcctgcgagcatccgttcagcgcgaacgccagtcccagacatagcgcgcctacgaccagcaggcgtttcgcccgggacatgttccttgcgatggtccctcccatagaatcttcctttcttcgacttcgttgccttgcgtttaccgctctatctcgcgtacgggcacgcacacgcgcaccttgtcgccgtatagggaattgacctccacgtccacgtcgtagatggtgctgaccagctccttggtgataacgtctttggggtttccgaaggcgtgcacgcgtccgtcgttgatgacgagcgtttggtcggcgtaaagaaacgcctgatcgggctggtgcgtcgattggactatgctcatgccttcgcgcgcgagctggcgcacggtggacagcacgcgcacggtgttgccgtaatcgagcgcgctcgtgggctcgtccatgatgatggtgcgggcgttctgcgcgatggcgcgcgcgatgaggaccagctggcgttctccgcccgatatctgcgtgtaggggcgatgacccagatgggcgatgcccacgcgctcgagcgcatcccacgcccggtcgacgtgcatgcgcttcggcgtggagaacaaacctatcccgccgcccgcgctcatcagcaccacgtcgagcacgtcgtaggcgtaagtggacgaatgcgattgagggatgtaggcgacctcgctcgcgcgctcgcggatggagatcgagcgcaggtccttcccgttcacgcggatgctgcccgtccagctgttgttgaggcacaggatgcatcggaacagggtcgatttgcctacgccgttgggccccagcacgttcaccagcgtgttgtcggggatgcggaagctcaggtcgcgcagcacatggtggctgccgtacgagaagctgaggtgctcgacatcgatgctcatagcccctgcttcctcctcgtgatgaggtacaggaagaacggcgctcccacgaacgcggtcaggatgccgatgggtatctcggagctggccacgaggcgcgccacgtcgtcgacgatgagcaggaagctggcgcccatgagcatgctggcgggcagcagcttgcggtagtcgcagccgacgatcatgcgcgcgaagtgggggatgacgaggcctacccagccgatcatgcccgagattgacacgctggcggcggtgacgagggtggcggccaagatgacgatgagccgcacgcgacgggcgttcacgcccatggtggaggcttcgtcgtcgcccatggtgagcacgttgatgcgccagcgcaaggcgaacagcgccgcgagaccgattgcgatgggaggcagcgcgaaagccatgtcgctccatttggcgccggtgaggctgcccatgagccagtaggtgatggcggccagctggtcggtagggtcggcgatgagcttggtgaacgacacgcccgcctggaacagcgagctgaccatgacgccggccagcaccacgatgagcagatggttgcccttggcgcgcgtgccgacggccagcaccagcagcacggcggcgatggagcaggcgaacgcgaacagcgagatgccgagcgagccgagtcccagcaggatggccactgcggcgccgaacgccgcgccctgcgaagctccgaggatatcgggggagacgagcgggttctggaacgtgccctggtaggcggcgccggcagtagccaggctgcagcccaccatgagcgcgagcacgatgcgcggcagacgcacctggaagaacagcgtctcttgctgggaggtccagaacgggtcgatggggagcgccaggttggccagcatgccgacagcctcgatcggggtgatggggtagcggcccagcatgagcgaggccagcgtgctcgccaggacgagcgcgccgagcgcgactaggatgagcgtgccatgccgcgcgcttcggcgggaagcgcattgagccgccgccttgtcgtcgcgcggccgaggggccggcccctcggtgcttccggcgctcatagcgccggaagcaccgtccccatcctccagcatgtcttcaacagcttctattgccctcgtcctttaacattcgtaaatgagaataatatttaaatcaatatatactaaaacgcaattattatcaattgagcataatataaagacggtatgaggcgggaagggcgtttgaagcttgcgaggggcgggcgatagcctggcgcgcgggcggggcgcatgccggttccggtgggtcgcacggcgggtcgaccggagaatgcgggcgcgcgtcaacgcgggcggtaacgctctcgtacagatgtttcacgtgaaacatctgtacggtttgcgagcgggggcaggaggggctaggctcggtcgcgttcgatcatggtcatctgcaaagcctcgccgaagaactggccggcaccgttcttgattgcgaaacgggtcttctccggatcggccaccacgctgccggcgagcgcgtcggctccctgctcgaacaggaccgacgacatgaccacgctcgggcctacaagcacggtggtcgcattgcgcgcgagttcgagcaggcgcggcgcggtcttgttgatgatggtgacgccggttatgaaagcgaagtcggtatcgggcagcacgtactcgcacgcggggtcgggcgtgtcgagctcctgcgagcagttgcgttcgagcacggtgaggttcgcgtactcggcgatgcggtcgacgtgcgggaagtgcccgaccaccgtgacgttcttgcgctcggacgcttcgatacgcgggcggtacagctcgaaagcgtccatcttgcggacggtgccgtcgggcagttcgatgggttcgtcgtaggttgctcccaacgggtcgagcagctccttgcgcgcgtagtaggcgttgagcgccgccactcccagcgtggcttcctcgaagcaccacgacttcgccagctccgccatctcgcgcagccccgtgccgcgcagatcctgcttgcacgcgcgccgggatccgcctttgcaggtgaagctcacgcccatgccgcaatcggcctcgacgtaggaccagtgcgttcccagacaataatcgcgtacggcgatatcttccggaatgccctcgatcaggcggttgtagagcttccacggcgttgcgtcgtcgcgcgtgtcggggcggcggacggcttcgttctcggagcgtttcatggcagccttctctcctcgaggcggcgtgttccgtcgcgccgccattcttcaatatgcggtagagtataatatacgttcaagaataaacaaccgggaaggggctggcgctgcgatgctgttcttgttgacgggcgacgtgcagatcggcaagacgcgctggcttgagcgccttgccgccgagctgtcgggtgacggcgtgcaggttgcgggcgtgctggcacctggcgtgtggcgcgtgcgggagccgcacgaggttccgggcgaacgggggctggctggcgagggtcgcttcgagaagctcggcatcgacaacgtgctgctgcccggcggcgagcgcgtgccgttcgcgcggcggcgagacctggcgctggccgagggatcgttcgatccgacaagccagagcgcctccgcccagctggcctgggagatcgcggacgaggctatcgcgcgggtgaacgcgcacttcgatcgcatcgcggccgagctggctgcggttcccgcgggagcgccggctttgccgggagaagcgggctcccggggctacgcgcccctccccgtcgatccggcggcgggaatgtttcacgtgaaacattcgttcgcgcaaacatatgtttcacgtgaaacatctggagcggaggcgggcgagaccccggccgatccaagtacgggaggttcgcgcatcgtcgttgaggcggacgaacccgacgcggagggctccgttaccgtcggtgcggagggcggtttgctcgtggtcgacgagctggggcggctcgaactcatgcgcgacggcgggctcgtttctgcggtggcgcttctggagcgcgggccctcggcgcggttcccccatgcgctcgttgtggtgcgtgattggctgtgcccgagggcggaggagcgcttcgccggcgcctgggatgggtcgcgcatgctttcgccgggcgacgacgcgcgcggtctcgtgcgggcttcgttcggcctttccggctgagatccgtgctcgttgtcgttcgaaaaacacgcttcgtcctgcgattccgtgttttcgggcgacaatgcgccgctcgcttgttggcgttcggctactgtgcgtccggtgcgttcgaccatgcggccaattcgacccttgctttccttaatgagaatgattatcattaaaatagaagaaaacgagaagagggaaaggtgtccgcatgatcgatcagaccgcgttcttcagcttgagctacgggctctacatcgtcggcgcgacggacggcgaacgtcgcgccgcctgcgtcgctaacacgttccagcaggtcacgtcgtcgccgttgcaagtaagcgtggcgctgaacaaggagaacgccaccacggacgtcattctcgactccggccgcttcaccgtgtcgtgcctggcgcaggacgccacgatggagctcatcggcacgttcggcttccattgcagcaccgacctggacaagttcgcctcttgcgagacgggcgtcgacgcggcgggcgtgccgttcgtggccgagcagtgcgtggcgcgcttctcggtgcgcgttgtgcaggcggtgaacctgggcacgcacatcctctacatcggcgaggtggaggaagccgagaagctgtgtgcgggcgatccgatgacgtacgcctactaccacctggtcaagggcggcaagacgccgccgaaggcatcgagctacctgcccgacgcgcccgatgcggcgccggcagccgcggcagcggccggcgagggcgacgcggaggctccgaagcccaagtacgcctggcgctgcaaggtgtgcggccacatcgaatacggcgacgagctgcccgatgacttcacctgccccgtgtgcagcgtgggtcccgacatgttcgagcgcatcgagctgcaaggcgcgcgaacggcataaaagggcggtataaagtgaactgcgccccggttcttggacaaggaaaataaaggtggctatgctgctaaggactggttccggaattcctccggggtcagtcctttcagtttaacctgccttcgcctcgtgttccagtggacgatgtacgcctcgagcctctccttgaactcctcgaagctctcgaagctctgcccgcggaagaactcgtccttgatatggccgaagacctgctcggtcgcgccgttgtcgatgcagttgccctttctcgacatgctctggacgatgcccgcctcctcgagcgtcttgcaataaccgtcgtgctggtactgccatcccatgtcggagtgcatgaccgggctcgcggcctccggcatcttcgccagcaggccttccagcatctccttttgctgcgccatgttcgcagaccgcgatatgctccaggacacgatctccttgctgccgaagtcgtacgctggggcaaagtaggccctgccccacggggccttgaactcggtgacgtccgtgccgagcttctgccagggttcgtcggctgagaagtccctgtccaggacgttgtcgaacgccctgccgacaacgcctttgaacgagttgtacctgtggtagtcgctctcgcgccggatgccgcagctgatgcccatctcgtgcatgatcttcagtgcggtcttgtcggctatcgccacgtcctcctcggcgcgcagggccatggcgacctgcctgtgtccgcagccgttggccgtgcgggagaacacctccgccaccttctcccatagctccggcctcgtcggcctcggcgggtgcgagcgggcgcggtagtaagtcgatctcgggagcccggcggctgccaacaggtcggaaagagcgtggccttgccctgaaagcatctcgatcacttgggacttctcccagctcgagacttctccgcctccagggcgcggactttttttaagtaggcgttctcggcttcgagcctgcgcacgcgcgcctcgagctcttgctcgcgcgtcttgggcgcgctttgagccgcagatcccttcggcctgcccttgggcttgggcctgagagcgtcggccccgccttcgcggtagagccggcaccaggagtcgagcggggtcctcgacgcgatgccgaaggcggccatggcctcgggcttgcccatcccctcgtccacgacggcccgagctgcggcgaccttcgtctcccaagcgtatctcgttttccggctacccatgcagagcagcacctcgcttccgaccgacctgtacgtcagaagccatttttccacgatgctggccgacatgcaaagcctcgcggcgacgatgtccctgccgtacccctcgtcgaacagctcgaccgctagttcgcgcatcttcctgtcatgcttcggcggcataaagaagcctcccatctctcgaactttactttcttgtccaagaaatgggaggcagttcaaaggggaccgcctctttctatgccacctttctgtgtcggagcgcgtcccgaacggcgatcggccgttcgggacgcgctctacttgttccaagcgatgaacgcccaggtgaccgttcggggctcgcgcaggcgcagggacttctccggaagccccttcttgtcgggctgcccggcgcgctcgttcggcacgaggttctcttccagccagcagcgcaggcgaccgaacgcctccgcgcgctcttcggctccgacggtcgcgcccacggcatcgtccgccatgcgcgcgaacgcgtcgtaggcatcgtcgagcgagtcgaacgtgtcggtgcgctcgctgtcgatgtaggaaacctcggggcgcagtccctcgttcgccaggatgttgaacgcatagaggtagtcgcggccgagcacgctggaaaggcccatggcgttgaggatgcgctcgtcggtgcgcggcgacgagccggtggccagcgtgacgcatacgcggcggcgcgccacgtcggtgaggcgcagcagcgaatcgcgcagatcggcggtcgcgacggagcgcgaggcgagcgccacatctaccatgcccgggcgcacgccgaggctgggccaatcgtcggcccagctcatctgcttggggaacaccgtgcgcacgccctcgcggtcgagcgcttcctgcagctggccgagcatgccctgcgagaaatcggcggccaccaccttgtggccccgtttgcccaacggcaccgacagcgcgcctgtgccgcagcccatgtcgaacaccgtctcgccctcgcggatgccggctagctcgaggaaccgctcgacgtaagggttcggcgcgtccttcgtggtgaacgtggccgaccgcttgtcccagtagctcgcgtcgtcgaagcggcgtcgtgcctgctggagccgcttccactcctcgttccaatcgcgggcggtcagcgggttgacaaaggactcggacgtgttgttttcgggcatggcgcgcctctcgctttgatggttgcgggcttttaggtactatactagcgaaatgaaacgcctctgtgcgcgcgatccgccgaatttatcccgaaacgaggagcattcatcttatgcaagtcgaactgctgtaccacacgcccgaccccgagcgcgcgatcgccacggcggcgcgcctgtgctacgcgcccgtcggcgcggccgagctgatggaggccatgccggaggagcgcgtgaaaagcgtgctgtccaccatcatgagcgcgggccatacgtccacgctcgagcacgccagctacacgttcgcggtggacggcgtctcgcgtgcccttacgcaccagctggtgcgccaccgcatcgccagcttcaaccagcagagccagcgctacgtgaagttcaccgacggcctggccactgtgaagcctgaaagcgttgccgcgaacgaggagacgaacgcggtgttcgacgaggctatcgcggccgccatcgaggcgtacgagaagctgctggccgcgggcgttcccgccgaggacgcgcgctacctgctgccgaacgcggctgagacgaagatcgttatcacgatgaacgtgcgcgagctgctgcatttcttcagcttgcgctgctgcaaccgcgcgcagtgggagatccgcgagatggcgcaccgcatgctggagctggcgaagcccacggcgccgttcgtcttcatggacgcgggcgcgccctgcatccgcggcaactgtcccgaaggcaagatgacctgcgggaacccgtacccgcgcgtgaaaagggcctagcatggccgagcagaagagcgacctgtcgcgggcgttctccgaggacggtgcgctgaagacgcacgtaggcggccaggcgctcatcgagggcatcatgatgcgcggcaagtacaactggtcggtggccgtgcgggagcccgacggcggcatctacgtggaagagcatgacctggcctcggggcgcaagaagaacggttggatgtactggccgctcgtgcgcggatgccgagctatgctggagtcgctcgtgctgggctacaaggcgctcgagatcgcggcgctgcatgcgttcgcggaagagggggaagacgaacctgcggcggccgaggaggcgggaggggtctgcagctcggacagtcctgctcgcactaacagtccgctggactgttcggctcgtgcggaactcgcctcagacccctcccgccccctcggcgatggcatcgaatcttctgccgacgccgacgctgacggcggcgacgatgcgcgccttgaacccgttcttgctgcagaagccgaggaggagagggctttctcctggaaggaggatttcgggcggccggatacgatgatcgatgcgttgggggcgcagcgttccctcgaggtggtttccgagccggaatcctctcccgagtcccagtcccggcccgaacccgccaagaagtccttcatggacgaggaggtggagttcggcaagaaagagatggccgtgtcgatggtgctgggcctcgtgctgggcgtggtgctgttcatcgtggcgccggcgttcatcacgaacctcatcgtgggcgagtacgaccagaacaccgtgctgtggaacatcgtggacggcttgcttcgcgtgggcgtgttcgtgttctacctgtggctgatcggccgcatgcaggagatcaagcgcatgttcggctatcacggcgcggagcacaagaccatccactgctacgagcacggcctgccgctcacgcccgagaacgcgcgcagcttcccgcgcctgcacgtgcgctgcggcacggcgttcctcatcatggtcatggtcatcgccatcttcgtgtacacggtgacgcccatcaacgggctcatcgagctgtggggcgtgccggacggcgcgccgaagctggcgctggtcatcctcgtgcgcatcctgctgatgcccgtcatcgccggcatctcctacgagatcacggtgaagtgggcgggcagcaaccccgacaacccgctggtgaaggtggtgttgtggcccggcatgcagatgcagtacctcaccacgaacgagcccgacgacggccagatcgagtgtgccatcgccgccatgcagaaggtgctcgagcgcgaggaggccgaagaggctggcgagaaggcggcagccggcgcgcccgataacgccgacgagccggcgacggcgaccgcgtagagcgctcgatcgggggtgcgggcggaaaaacgcttgccccccccctcgctgttatactcatgcggaaccgttccctatccgactcaaagaggtgagccgatggaatatgccatatccgcacgaggtctgcggaagtctttcaagctctcggccaagcagcgcaagctcgaacgcaccgacgcgcgcgtgaagaccgcggtggacggcttgtcgttcgacgtggcgccgggcgagatatacgggctgctcggcccgaacggcgccggcaagaccacgacgctgcgcatgttggccgcgctcgtgaagcctgacgagggcgacgcgctgatcgagggcgtctccgtcgtggacgatcccgcgggcgtgcgcagcctcatcggcttcctcacgagcgagctcaagctggaagacgtcttctcgcccgactacctgttcgacttcttctccgagctgcaccatgtcgacgcgcccgtgcgcgacgagcgcaagcgccagctgttcgcgcgcttcggcatcgaccgcttcgcgcagacgaaggtggccgacctgtccaccggcatgaagcagaaggcatcgctggccatctcgctcgtgcacgatccgcgcgtcatcatcttcgacgagccgacgaacggcctggacgtgctcacggccaagacggtgaccgacttcttgctggaactggcggccgacggtaggacggtgctcttgtccacccacatcttcagcctggtggagaaggtgtgcgaccgcgtgggcgtcgtcatcgacgggcgcatggcggcctcgggaacgctgtcggaggtggcgggggagcgctcgttggaagacgcgttcttcgacctgtacgcggcgagcgtgaaggaggcatcgtgaaaggcaacgcgtgggccatcgcgcgcaaggaactggcgcgcttcttcagcaacaaggcctcggcgctcgtgtccatcgtgctgccgggcctgctcatcttcctcatgtggacgttcatgggcgatgcgatgggcggtatgttcaagaccgatatgagcaagcctccgacggtggctgtggtgaacgcgcccgaaagcgtgaaagcgcttgcggcggattcgatcgtcgacatgcgggacgagccttcgctgcccggcgccgatgagatgcgcgaacgcatcgagcaaggcgacgtcaaggcgttcgcggtgtttccggagggcttcgacgaagccgtggcggcgtatgaccccgcatcgggcgtgccggcgccgcaggtggagatctacttcaactccaccgaccccgattccagccaagcgcgctcgaccttcgccgcgatgctggactcctacgagtcgtcgctgtcgaaccgcttcgacgtcaacgcgggtggagccggctacgacgtggccgaggagcgcgacgtcgcgggcatgctcgtggtgtccatcgtgccgcttctgctgctcatcctcgtgttcagcagcgtcatgtccatcgcggccgagtcggtggcgggcgagaaggagcgcggcaccatggccacgctcctggccacgcccatcaagaggcgcgatatcgcgctgggcaaggtgctggccatcaccgtcatcggcctgctcatcgcggcgtccagcgccatcggcatcttctcggggctgcccggcatcatgcagggctcggtcgacatcaacgtgtacggcccggtcgaatacgtgttgctggcgctggtcatcctgtcgacgacgctcgtcatcgtcgcgctgatcaccgtggtgtccacgctggcgaaatcggtcaaagaggccaccatgttcctgacgccgctcatgatcgtggtgatgctcgtgggcgtcctcggcatgttcggcgacgcgaaggccgaggttgcgtactacctcgttccgctgtacaactcggtgcagtgcatgatcggcatcttctcgttcgatttccagcccctcaacgtggcagtctgcgtgatcgccaacctcgcgtacgccggcgtcggcgtgcttgcgctgcagcgcatgttcgacagcgagcgcctcatgttcgcgcgctaggccggcgccgctcgcgcgctatcgaagaaagaaggttggtcatgaagatgattttcaagaacaagcatggcatggtgcgatccggatggatcatcgcgctgtgcatggccgcgttctacgctctcggctatgcgttctccgccctgctcatcgatgctttgcgcatgattcttgatgccgccagcctcgatgctgcgtcatacgatgcgctcgtcgattggatgagcgcatcggtgctgcccgttgccctgcagttcttgacggagggcatcatgctggccgtccccttggctgcgtggaggatcatgaggtatcgttgggaagacctcggcctccgtgattttcgcgcccggttcaagaaagacggcgttgtcgggatggcgctgggtttcgcggcgtgcagcgccatcttcctgctgctgctcgccgccggcaacgtggtagtcgagggggtcaattcgccgttttctctctcgcttttcgcctgggtgctcgtgttcgttgcggtgggcatcgccgaagaggtcatgaatcgcgggttcatcatgtcggttttgcggaggacgaacagcaggttcctggtgatcgtcgtgccgtcgctgatcttcgggttgatccatctcaccaatccgaacgtcaccttgctctcggtcgtcaacatcgtattgcttgggatcgccctttccctcatgtactacaagtcgggcaatgtatggatgtgcatagggttccatatcgcttggaacctgttccagtcggtcgtgtacggcatgccggtgagcggcttggatgttcccgcgttcctggtgagcgcctacccggttggaaacctgctcaacgggggcggtttcggcatcgagggcggcgtgctcaccaccgttgccgccgtgtccgtcatggcgttcacccttttctattaccgcacgtccgagtatcgtttcttcggcgaccacgcgaatgcgccgcagagcccggcggcggtcgggcaggacgaggaggctcccgcgattcgataggaggcgcggaccggtttcgtatggaacgcgaccgattccgctatcgtcaagctcccgtaaccttcctgccatctgggatgatggggcgcatgctagactgaacgatgcatgttgtcactgtcagtcgaccgcggcgcccctcgaagatcgcggcctggaacctttacgggaggcgtcaagcgtggctcaagcgatcacggttacggacattcgcaagaacttcggcgcggtcgaggcgcttaaaggcgtttcgctcgatgtggccgagggagagaaagtcgtcgtcatcgggccgtccggctcgggcaaaagcgtgctcatccgttgcatcaacggtcttgaggtgcccgattcgggcacggtggtggtcgaaggcatgaacctgtcggaccgcaaggtgaacgcccgtgcgctggctcgcgacgtggccatggtgttccaaagctacaacctctacccgcacaagaccgtgctcgagaacgtgacgctggcgcccatcaaggtgctgaaggtgccgcgcgagcaggccgagcgcgacgggcgcgcctatctggagcgcgtggggctttccgacaaggtggacaagtaccccgaccagctctccggcgggcagcagcagcgcgtggccatcgcccgcgccctcaacatgcatcccaagatcatgctgctggacgagcccacgagcgcgctcgatcccgagatggtgcaggaggtgctcgacgtcatcaagtcgctggccgagacgaacatgaccatcgtcatggtcactcacgagatgggtctggcgcgcgaggcggccgacaaggtcgtattcatggagaacggcctggtggtagaccagggcacgccccattacctgttcgatgagaccgacaacgctcgcgtcaagagcttcctatcgaagatcctgtaggcgcggccatgatcacgagaagaacgttcatacgctcctcggcgctggttgcggcgacgctcgtgctgggcggggcgacgggcggcctcgccggttgcgccagcggcgcagacgtgctgcgcgtgggcacgaagatcgacgtgcccggcttcggcttccagaatcccgagacgggcaacatcgagggcatggaagtggacatcgcgcgcgagctggcgaagcgcatcaagggcagccccgacgcgctcaaggtgaccggcgtgaacgtcaccacgcgcggcgcgatgctggacaacggcacgctcgatgccacgctggccacgttcaccatcaccgaggcgcgcaagaagagctacaacttctcgcgcccgtactacatcgatcacatcggcgtgctggtgaagaagtcctcgggtatcgtcgatctcaaagacctcgacgggaagaccgtgggcgtggcgctgtcggccacgacgcgcgacaagctgaccgccgccggcgacgagatcggcatccacatgaacttcgccgagtactcgacgtatcccgagatcaagatcgcgctggtcaccggccgcgtggacgcgttctcggtggaccgctccatcctgaacggctacgtggacgactccaccatgctgctggacgcgcagttcgcgccccaggagtacggcgtggccacgaagaagtcgaacaccgagctggccgaccaggttgacgccgccatcggcgctatggccgacgacggcacgctgacggcgctgcaagagcggtgggggctctcgaccgagacgcctgccggcgaggaagagggaggcggggcgcatgcttgacatcttcgccccctacaaatgggaggcgctgttcgagcgctggcccgacatcctcatggcgttcggcaccaccgtcggcatctcggtgctcgcgctggtcatcgcgctggcgctgggcatcgtgttcggcgtgctgtcggtgtcgcgcatccctgtgctgcgcggcatcacccgcgtatacgtggaagtggtgcagaacgtgccgctgcttctgcaggtgttcgtgttctacgccatcttcccgctgctgggcctgtcgctggccgcgttctggatcggggtcctggccatcggcatctaccacggcggctacatctccgaggtggtgcgcagcggtatcggttccatccatcgcgggcagttcgaggcggcgaagagccagggcttctcgtactggcagtcgatgttcgtgatcatcctgccccaggccatccgcatcatcatgccgccgcttgccgtgcaggcggccaacctggtgaagaacacgtcggtgctcgcgctcatcgcgggcggcgagctcatgtacttctcgaactcgttcgcgggcgcgacgagctactacgggccggtgtacgtggtggcggcgctgctgtacttcgccatctgcttcccgctgtcgcgtctggctctgtacctggagcatcgcacgcgctcgcataggcatctggccaccggcgacgccaccgaggcgttggccgaggacacgatggaggtcacgccgggcacgcacgacatcaccgggcgcgcggcggccgacacgatggcgggcggcgtgcagaccatgtacggcaccgtggacatcgccccggcgcgcgtggcgccctcgccgcgccatccgctgcacgcgcttgccgaggacgcgctggagccgggcgtggcgccggaggacccgtacgatcagacgttcaccggcaaccaggcggccgagatcgccgacgagatcgggcgcgagatcgcccaggagatcgccgacgagtacggcgacgacgagcgggcggcgcgcgccatgcgcacgaagtccggtcgtttgaaggcgcatcggcgcctcgagcgccgcgtggccgcgcggcgcggcgtggaaggcgcgcgcgaaaccggcgcggcggtgcccgttgcgccgagcgccgccgccgaaggcgagcgggacgagcgggcgagccgtcgcagccccgaggccgacgaggcgctggcttcgcgcgccgagaccgtgacgagcgaccgtatcacgcgcgacgtgaagcgccgcgtcgacgaaagcgcgcgggcgcgatccgcgcgcgaccaggtccgcgatgaggcggagctgggagaggaggctttcttggataacgattacctgccgggcgagctggagcagcccgatgagcgcatcgcgcaggtgcgcagccctcgcgacgaagccgatctcgatgccgaggccgagagcgctacggcgcgggaagaccgtcgcgagcttcgcgaggagcgccgcgaagaacgccgcgaacgccgcgaggcgcgcgagcgggccgaccggacgggaggcccccagaccgtgcagcccgacgacgtgcgcctcgacgaggaggcggatcgggcgctcgaggacgccgaggaggccgccgagaccgacgagcgttccatggacgtcgagcgcgccgagctggccgagggcgaagaggcggccacgaccgacgacgggcggaaggatcgctgatgagcgatatcgccgcgctgttcacctgggtcaacatgcgcttcctgttgcaggggctcggcatgacgctgctcatatccgctttggccatcctctgctcggtggtgctgggcacggtcatctcggtcatgcgcacgtcgaacgcccgcgtgctgcggggcatagccaccgtgtacatcgagatattcaagaacacgccgctgttgctgtggatcatgttcacgttcttcgtggcgcagttgccgcccatcggcgcggccgtgctggcgttcaccctgttcacaagcgcgagcgtggcggagatcgtgcgcggcggcctggccagcgtgccgcacggccagtacgaggcggcgcgttcgcagggcttctccaccgtgcagacgtacgtgctgatcatcctgccgcaagcgctgcgcaacatggtgcccgcgctgctgtcgcagttcgtgaccaccatcaaggacacgagctacctgtggggcgccatggcgttgcaggagctcatgggccgcggcatgatcctcatgaacagctacaactccaccgcgcagatcttcgccatcttcggcatcatggcgcttatctacttcatcgtgtgcttcacgctgtcgcagatcgtccgcgcctaccagcgcaggctgaaggaagcccgcgccgcgtagggagggttgcacgagcgcgtttcccagccatcccgagcgcagcgcgaagtcgaaggatccccctgcgcgtcatccgaacggcgttccgccgaccggggccgccgcatgcgacaacagcggcgggcctatgtgcggcaaaatcgggcttttggcagcacggaaacgagcttctcgcggaggcggtcgggcgatcaggcgttttcccgacagcttggcgatcgggcgtcttcttgcggcgttcgaaacgtgaaaacgctgccaaaagttcgattttgctgcagatcgatccctggaaacgtgcgcgagacggaatttgcgccatgcggcgagccgttctatcccgcaccgcttgcctcggctgccgacgctactgcacgtaggcgaggtaggggaggtaagcctgcgcgctttcggggacggcgagcgtgaccgtctggccgtagacctcgacggagacgtagccgggatcgtcgtaggtggtgacggtgccgttgatgccgagggcgttaccgtcgatggtgccggtggccgtggcggtggagggcagcgaggcggcttgccatccgtcgatgtcgagctgctcgatggcttgatcgacctggctttcgctgaggccggtcgccgcggcgatgctcgctttgctgccctcgagggcgctcttggccttgtccttgaggccggtcgcgtcgatggccgcgttcgcggcggctgccttcgcgtcgttcgccaggtcgctggcggggcccgatccggtgcccgagaaggcgaacacgcccacgatgcctacgatgatgagggcgatcagcccgaggaacacgcccaggactcgtttcatgcgtaacctcccgtatctcgacccagagggccgttgcgttcggcgggacgccgccgctgctgcgttcgtggtgcgtgcggagcggggcggtgggtcgtttcggcggctcatcccttgcgatcaagggtacccgagaacggggcgcttcacaaaacgaccccagcatcttcaacccgcggtaacgaaataaccactcgatttccggaagtgcgcatgcgacgcgtgcgcgaggagtgcgccgccgctctgccggtacaaacgggattgggaagagaggcggcctttatgaccacgctcagcgaataccatgcggagcagatgaaagacccggaatacgccgctgaatacgagcgtttgcggccggagtacgacatcatcgatgcgattatcgcggcgcgtgccgaagagaatctcactcagcgcgagctcgcgcagcggtgcggcatgaagcagagcgcgttcgcccggctggagtccggcaacgccaaccccacgctcgaaacgctcaagcgcgtggccgagggtctcggcaagcagctgcgcatcagtttcgtctagcgcgtccgttttcgccagcttggcaatttctctcgcgcggcgcggaaaatcgtgtatgctaacacctgctgtgcccgaacggcgcggcgcatgcgcgcttgacggcgcgcccatccccgcacacgttaataaataggtggggcaaccgtgtgaacgaaacaaggctgcgggaggcggccggaaagaacaggagggaaccgcgtgaagctggtggtaaccgagaagaacgacgcggctcagaagatcgccgatttgcttggcgtgaagaaacccaaggcggacaaggtgtactcgacgccggtgtaccgcttcgacgtggacggcgaggaatgggtgaccatcggcctgcgcggccacatcctggagcccgacttcgcgccgacgatggtgtacaagaagcgcgggggatggcagggcgtcaccgaggagggcgaaacgcttccggcggagctgcccgcgtcgctgccgaagcccccgttcaaaaagaagaagcccttcaccgaggacggcgtggagctgaaatcctggaagatggacgcgctgccgtacctcgtgtacgcgcccatcaacaagctgcccaaggagaaggagatcatccgctccctgaagaacctcgcgaagaaggccgactcggtcatcatcgccaccgacttcgaccgcgagggcgagctcatcggaagcgacgcgctcagctgcatccaggaagtgaaccccacggcgcccgtgtcgcgcgcccgctactcggcgttcacgaaagaggagatcacgcacgccttcgacaacctcgtcgagctcgacgtgaacctcgcctccgccggcgcctcgcgccaggacatcgacctcatctggggcgcggtgctcacgcgctacctgacgctcgtgaagttcgccggctacggcaacgtgcgctcgtcgggtcgcgtgcaaactcccacgctcgccctcgtcgtggcgcgcgagcgcgagcgcctcgcgttcgtccccgaggactactgggtgattcgcggcgcgttcggtgccgatcccgactcgttcgaggccccgcatgccaccgcgcgcttcaaggcggaggccgaggcgcaggccgtcatggcccatgtggagggcgccacgcgcgccacggtggcgtccgtcgagaagaagaagcgcaccgtgcagccgcccgcgccgttcaacaccacctcgctcatggcggcggcgtcggccgagggcctgagccccgcgcgcaccatgcgcatagccgagagcctgtacatggacggctacatctcgtacccccgcgtggacaacacggtgtacccgagctcgctcgacctcgccgacacggtgaaggccatctccggcaacccggcctacgcgccgtactgcaaggagctactggcgaagggcaagctcacggccacgcgcggcaagaaggagacgacggaccacccgcccatctacccgaccgccaaggccacgcccgacgatctggctcccgccgactacaagttgtacaacctcatcgcgcggcgctttttggcgacgctgtccgaggcggccgtcatcgagggcacgaaggtcaccctcgacgtgaacgccgagccgttcgtggcgaagggcgacgttctggtgaagccgggctaccgcgctatctacccctacggcctcaagaaagacgagcagctgcccgcgctttccgagggcgagaccgtcgcgttcaacggcgccgtctgcacgaagaagcagaccgagccgcccgcgcgctacagccagggcaagctcatccaggagatggagaagctgggcctgggcacgaagtccacgcgccatgccatcatcgagcgcctctatgcggtgaagtactgcatgaacgaccccatcgagcccagccagctgggcatggccgtgtgcgatgcgctggacaagttcgccccgcacatcacgcaccccgagatgacggccgagctggaagaggagatggacaacatcgccgagggccgcacgacgaaggcccaggtggtggacacgagccgcaaccttttgtccgagcagctggccagcctgctgccgcactccgaggaggtgaaggaggccctggccgacgccgtggccgccgacgcctacgtgggcccgtgcccgaaatgcggcaaggacctgcagctgcgcgcctcgcagaagacccgcagcatgttcatcggctgcgccggctggcccgactgcgacgtcacgtacccgctgccgaagggcaaggtggaggccgtccccgagccgtgtcccacgtgcggcatgccccaggtgaaggtgaccgcgttccgcagcaaaccgcgcaccatctgcatcgacccgcattgctccacgaaccaggagcccgacgtggtggtgggcgagtgcccggcctgcaaggagaagggcatccaggcgaagctgatcgcgcagaagaacccgcgcaccctgaagcgcttcatccgctgcgagaactacgatgactgcggcacgggctatccgctgccccagtacggcgcgctcacggccaccgaggaggtgtgcgagcactgcggcgccccgatggtgatcgtcaccaccgcgcgcggcccgtggaagctgtgccccaacttcgactgccccggcaaggagcagaaggaagacgagaagggtgccaagggcgccaaggggacggcggccaagaagccggcggcgaaggctcccgcgaagaagcccgcggcgaagaaagccccggccaaacgcgcgcccgccgcgaagaaggactaggcgaaagcgcggaaggcgtgaagaaaccgtccgcttggcccgccgagaaaacacagcgacgggccaagcggtacaatcatgcgaagtacgatcaacgagcgaggagagctatcacatgcccaaggtaaccatcgtcggcgccggcaacgtcggtgccaccgcagcccacatcatcgcgtccaagaacctggccgacgtcgtgctcatcgacgtggccgagggcctgccgcagggcaaggcgctcgacatgatgcacatgcgcagcgtcgagcagttcacggtcaaggtgatcggcacgaacgattacgccgacacgcgcgattccgacgtggtggtcatcactgccggcatcgcccgcaagcccggcatgacgcgcgaggacctgctcggcgtgaacgccggcatcatgaagtcggtgatcggccaggccatggaggcgtccccgaacgccgtgttcatctgcgtgacgaacccgctcgacgtgatgacgacgctggcgttccgggagtccggcctgcccgcgaaccgtctcatgggcatgggcggcgtgctggactcctcgcgtctggcgttcgcggtgtgcgagcagctgggctgcgcgccggccgacgtgaccgcctgggccgtgggcgcgcacggcgagggcatggtgtgctggccgcgcttcaccacggtggacggcacccccatcactgaactcatggacgaggcggccgtggccagcgtggtgcagcgctgcgtgaagggcggcgccgaagtggtggccttcctcaagaccggcagcgcctactacgcgcccggcgcgtccatcgcgaagatggtggaggccatcctcacggattcgcacgaggtgatgagcgtgtgcgcgcacatcgacggccagtacggcatcgaggatctctacatgaacgttccggtgcgcctcggcaagaacggcgtcgaagaggtcgtggagttcgacctgaacgatgacgagctggccgcgctgcgcgccagcgccgacagcgtgcgcgcgggattggcgaacctgccggagtagccgatctgcgagacgggggagggagccgcgcagaacttcccgcacgcgcagcgattgctgccgtacggactcctcctgtccctgccggttgagagggtcggcgtaggttgcgatagtgcggatcgggggagcgtcgcttgggcggcgctccccgtcgttaagggaggggttgcgctccccctgggaaggaagggctcagcatgctggtcgagatcgacgagaggtactgtatcgggtgcgggcgctgcgtggacgattgcgtgggcgcgaaccttgaggtagagggcgtcacggcgcgcgtgaaagggctctgcatcctgtgcgggcactgcgtggccgtgtgccccaccggggcggtgtccattccaagctacgatatggctgacgtggaaacatgcgtgcccgccggcgcggctgtcgatcctcgcacaatgcttcgggtcgtcaagtcgcgtcgcagcgtacgcgactacctcccgaatacgatcgagcaggacacgctgcgcctcgtgctagaggcgggacgctacaccgccacggcgaagaacgcccaaggctgccgcttcatcgtggtgcaggacgagctcgacgagttcaagcgcctcgtgtgggacggcatcgagggcatgctggcgccccctgccgccgacaagccgcgctgggtcaagctctacaagcccttcctggtcgacgcgcgggcggggcggcaggacttcctgttccgcaatgcgcccgccgtcgcgttcgtggcggccgagcgcgccgacgacgcggggctggccgcgcagaacatggagctcgtggcggcatcgctcggcttgggcgccctgttcaacggctacctgtgccgcgcggccgaggagcttcccgccgtgaaggcgttcctcgaagcggaggacaagccgctgcagatatgcatgctgctgggccatcccgccgtctcctaccggcgaaccgcgccgcgccgcgccggcgacttcgtgatgaagtagcgcatgaaggttgtaagcgtcgagcaggcgcgacggcatcgtttgcgcgcgcatcatctcgatcgcgcatacggcatcgaagacgcggcggagcttgcgggcgcgtgcggaatgcagaacacgccgccgggcgcatgggagacggccttgttcaaccgcgcgccggcctgtcgcagggaagatgccgagcgcctgctgtacggggagaagacgctcgtgcaggcgtggagcctgcgcggcgcgcccgtggtgttccccgcggccgaaagcgcggcgttcctgtcggcgctcgttccggcgaagggcgagccgtgggcgtacacgaagggcatcggccttgcgctcgatgcgctgggcatggagttcgaccggctgctcgaactgctcgtgcgggcgatgccgcgcctcgacgacgaggcgatcgcgagcaaggtggcgctcgatcaaacgttggcggattgggtcgagccgctgcttcctgcgaacaagcgcgcggcgtggcgacagccgtcgatgtacggcagccccgacaagcagacggtgggaggagccgcggtgtcgttcttgctgcgcccgtgctcgttcatgggcctcgtcgtgttcggcgagcgcgccggcgcaacgcccacgttcacctcgtaccgaaggtggacgggcggcgcgctgcagccggacgctgacgccgccgcgcgtctggtgcggaagttcgtccattgctacgggccgacgaggcccgatgcgctcgcggcctggacggggtgctcgggcgcgcaggcgcgccgcatgtggaagggcattgcggacgagctggagccggtggagttcggcggcaagaaggcatgggcgctggcggccgacctcgatgcgctcgcatcggtagcgccgccggagcgcgaggtgctgctgcttgccggccacgatccctatctcgatcaacgcgaccgcgccaccttgcaggtcgacgtttcgttgcagcggcgtatctggaagaccgttgcgaaccccggcgtcgtcgtgcgcaacggggaggccgtgggcacgtggacggccaagaagaagggtgcgggcctgtccgtctcgctggctacgtgggttgcctgctccgaacagaagctgcgcgacctcgccgaggcctacgccgcctttcggggtttgaagctgttgggcgtgagcttcgagtagcatctcggctcgtcccgagaaacatcgcgaatgcacggtttccggactccatgtgcggcaaaatcgtcgttttggcacgtcgagctcgttcggaagccgtgttccggaacaccgtcggaacgcgagctggggtttcgcctggccgattcccagaaaaaggcgtcgaagcccgtcgagactgccaaaacgacgattttgccgcacatcgccttaaggaaaggtgcggcgggacgccggatgcgggcgagcgtatgcgttcatgggaagatttgccgaagcgatcgacgggggcggggaaggagtaacgtgcttgcggtataatctctccttatggaaaccatcatcacgaaatcacaggtcgcggacgcagtctacgcggccatcccgaagctggcctgcgtgctgccggccgatatcgaagcggggctcgccgtggcgcgggagctcgagggcaatccgcgcgggcgcgcggttctcgaccagctaattgagaacgcggcgatcgccgccgaggatcgcgtgcctatctgccaggacaccggcaccgtgtgggtcagcctcgagatcgggcctgacgtagctgtacgcggcgacgtgttcgccgacgtggacgacgccgtcgcccgcgcctacgacgaggcgcgcctgcgcaagtcggtggtgcgcgatgccgtcctcgaccgcgcgaacacgggcgacaacacgcctgcgttctgcgacgtccatcccgtggacgagccgggcgcggcgcggctgcacgttatgctgaagggcggcggctcggacaacgcgagccgcgtggtcatgctggttccgggtgccggcaagcagggcatcgtcgacgagctcgtacgctgcgtgcgcgagaagggcgccaacgcctgcccgccgctcgtggtgggcgtcggcatcggctccacgttcgacaaggtggccggcttggcgaagcgggcgctcatgcggcctgtggacgagcccgcggccgacgaccgcctgcgcgcgctcgaagaggagctgctcgcggccgtgaacgccacgggcatcggacccggcggcctgggcggccgcacgacggcgctggccgtgcgcgtggccacggcgccgtgccacatcgcggcgctgcccctggccatcaacatgggctgctcggccatgcgcaggatcacggttccgctggcttgccagccagcggaacggctcgacgctgcggcttcccgccgtacccgatcttcgcgcgatgccgcaggcttgcgtaccgaagtacgcggcgcctgcgccatcccccgaatctcaggcactgcggaaaccctcgctgacttcgctgaacctgcgtctgatcgttcgcgctgtgcgcgaagcgccgcggatgcgggcgaggaggtgcgccatggctagcgctgatcgcatccgcctcgcgttgccgttcgaccgcgccgcgctggcccggttggaggcgggcgactcctgtctgctcaccggccctttgtacacgctgcgcgacgcgggacacgtgcgcctcttggccgagctggaagccgccggcggcgcgctgccctacggtctggacggtcaggccatcttctatgcgggtcccacgcccgaagcggccgggcgccccttcggcgcggtcgggcccaccacggccagccgcatggatttcgccgcccccgcgctgcaccgcgcaggcgtcgcggcgacggtgggcaagggccgccgctcgtccgaggtgcgcgatgcctgccgcgcgacgggttccgtttatttcgtggcatgcggcggggccgcggcctatctggcgaagtgcgtggcatcatcggagacggtggcgtacgacgatctgggaaccgaggccctgcgccgcatcgacgtggtcgatttccccgtcttcgtcggcgtcgacgtacggggccgcgacgtgtacgacctcgtctagccagggcacgctttcaaagggagagggaacgaccatacccgtgatacacgaatccgcacaagcaaccgatgccctgcgcggcatcttcatcacgttcgagggcggcgagggcgccggcaagacgacgcatatccgctttttgtccgagacgctgcgagcgcacggccgcgaggtgctgtgcctgcgcgagcccggcggcaccgaggtgggcgagcaattgcgcgccgtggtgttggacccggcgaacggcggcatgtccgacgaggccgagctgctcatctacgaggccgcccgcgcgcagctgatggcgcaggtcatcgcgcccgcgctggcgcgaggggccgtggtgctgtgcgaccgtttcaccgattcgacggtggcctaccaggcctacgggaggggcttgccgcgcatgttcgtcgaccgcgtgaacgagttcgcctgccagggcgtgcatcccgaccgcaccatcctcatggccacgggcggcgaggcgaacgtgggcctcgtgcgcgcgacgcatcggggggcggccgaccgcctcgagcaggcgggcgaggagttccatgcccgcgtgaacgaggcgtttctggaaatcgcccggcgcgaccccgagcgcgtgcgcgtggtggtctccgacggcaacaagtcgcagacggctgctgcggtgttcgccgagctggccgacctgttcccctggatggcgcaggtcgtcgacgacgaccctgcctttttcgaccgcctcgacgtgaagcgttcgaaagtggaggcgtaaagccgtggccgacgcgttcgagaacatcctcggccagccgcaggtgcgcgaattcttgcgcgccacggtggcgcagggcaaggtgagccacgcctacctgttcacgggcccggccgggtcgaacaaaacgatggccgcctacgcgttcgcgcaggccgtgctgtgcccgaagggggcctccggcccgcgcggaggcaactgcggcgcatgcgacgcctgccggcgcatcatgcgcaagaagcatcccgacgtgcgctacttcgcgcccgaaggcgcgggcggctatctggtcgagcagatccgcgacatcgtggccgatacgtcgatggcgcccatccaggcgcacaagaaggtctacatcctcgatcgcgtcgacctgctgggcgtgcaggccgccaacgcgttcctcaagacgctggaggaaccgccgtcggacgtggtgctgatcctgctcgcgcgtacgcgcgagagcgtgctgcccaccattctgtcgcgttgccaggtggtgccgttccgcaccatcccggcaagcgaggcggccggcatcatcgtgcagaacacgggcgcgtcgcgcgagcaggcgcgcatggccgtcgaggcctgcgacggctccattacgcgtgccgtggagttcttgaagtccaacgagcgcctggcgttccgcacccgcgtgctggaggtgctgggctgtctgcgcaaggcagacgactgggacgccgtcgggttcgcgagcgagctcgtggtgctggtgaaggcgccgctggacgtggcgcgcgccgagcaggagcaggagctcgccgagaatgcggacttcctggcgaagtcggccatccgccagatcgaggcgcgcaacaagcgccagctgacggccaagaccttcgaatcgctgcgccagctgacggccatcgtgcgctcgtggctgcgcgacgtgatggccgtgtgcgccgagacgcccgagctcgtcatcaacgtggatgcccgcgcctccgtcatggaggcggccgaggccaccgatgaggcgcgcgccgccgccgcgctagcggccgtgcgccgctgcgacgaggcgatctcgtataatgtatcaccggaaacgtgcatcgacgcgatgctgttcgagataagagaggtgctctatggttcgcatagcgccgattaacctgtattacaaccccaagacgctgtggttcgacgccggcgacctggacgtgcgcgccggggacggcgtgatcgtgtccacggcccgcggcaccgagttcggccgcgcggcccacgacgtgttcgaggccgacgaggcgcagatcaagaagctgaaaagcccgctcaagcctgtcaaacgcatcgcgacggacgaggacgaggcgcgcgcggccgagctggaggcgaagagccgcgaggcgctgcccgtgttcaaggagatggctgccgagggcaacggcgacatgcaccccgtgtcggtggagtacctgttcgagggcgacaaggccatcttctacttcgaggcggaggagcgcgtggacttccgcgagctcgtgcgcaagctggccgcgcacttccgcgtgcgcatcgacatgcgacagatcggcgtgcgcgatgaggcccgcatggtgggcggcctggggcattgcggccaggagctgtgctgcaagcgcctgggcggcgagttctgccccgtgtccatccgcatggcgaaggagcaggacctctcgctgaacccgcagaagatatcgggcgtgtgcggacggctcatgtgctgtctgcgctacgagttcgacgcgtacaaggacttcaagagccgcgccccgaaacagaacgccacggtggagacgcccgacgggccggcgaaggtggtggatctcgacgtgccgcgcgagatcgtgtcgctgaagatcatgggcgagaagcccgtgaaggtgccgctggccgacttcgacccgcccgaggaaggctcgaaccgcccgaaccgcgtaggcgaggaggcgtggcaggacgcgacgacggccgaccctatcggatttgcgggcgagtcggcgctgttcggcaccacgacgcagctgaccgggcaggacaagctggccgatccgggttccgtgcgccgcacgggccgcggcggtcagaagccgtcgaagggcggcggctcgaacggcggccgcgcgggcggcggccagaagggcggcggcaacggcggccagaagggcggcaaacaggccgacgcgcaggcgcagagcgcgcgcaagccgcgcaggaggcgctcgacgaaggtcggcggcgagggcgctgccgcccccgaggcggccgagacgcagaagcgcaagcagaagcagcaaggcggcggctcgccgaagggcgggcagggcggccagcagcagaagcgccggtcgggtcagggcggtcagagcggcaacggcggctccaagaagcagcagggccagcgccagggaggcgagggcgcgaagaagcaggggccgaagggcatgcagccctcgaagcctcgtcccggccagaagtcctcaggcctgcgccagggccagaagccgcagcagccgcgccaggacaaggcgccccgccccgagcgctcgggggctccgagcggcgagggcggccgcccgacgggagacggcgggcatcgccgcgcccgtcgccgcagccacaaggcgggcggctcggacggcgcgggcgcgcccggagcgggcggcgcggcgccgagcggcgaatagcggacgtacggaggaggctcatcgggaatgaagatcgactacgcgctgttgactgacctgtaccagctcaccatggcgcagggctattgggagaccggccagggcgacacgcaggcctgcttccacatgtactttcgcgactacccgttcaagggcggctacgccatcgcgtgcggcatggcgcagctggccgacctcgtggacgagttctcgttctcggacgaggacgtggcctacctgggctcgctcgacgcgcccggcggcggcaagctgttcaagccggagttcctcgactacctgcgtaccttcgagctgcgtgtggacatcgacgcggtgctcgagggcaccgtcgtgttcccgcacgagccgctggtgcgcgtgaccggccccatcatggattgccagctcatcgagacggcgcttctgaactgcgtgaacttcgagacgttgatcgccacgaaggcggcgcgcgtgtgcctggcggcgcaggctcccgtggcggagttcggcctgcggcgcgcgcagggcgcgggcggcggcttgtgggccagccgtgcggccgtcgtgggcgggtgcgcctccacgtcgaacgtgctggcgggcaagctgttcgacatccccgtgtcgggcacgcacgcgcactcgtgggtcatgtcgtttcccgacgagctcacggcgttccgcgcgtacgccgaggcgttcccgaagaactgcgtgctgctcgtggacacctacgacgtggagcagggcatcaagaacgccatcacggtgggactggagatgcgcgagcgcggcgagcgcctgagcggcatccgcatcgactcgggcgacttgtcgtggctcgcgcgcatggcgcgcgccatgctggacgaggcgggcctgaccgactgcggcatcgtgctgtcgaacgatctggacgagttcaccatccagtccatccgcgacgagggggcccaggtgacctcgtggggcgtgggcacgaagctggcctgcgcctacgaccagcccacgctgggaggcgtgtacaagctgtcggccacgcgcgcctcgggggagagcgagtggaccgaccgcctgaagatctccgagtcggccgccaagctgaccacgcccggcgtgctggacgtgcgccgctacttctactgcggcagcgggcgcttggccggcgatatggtgttcgacgtgaacgcgcccggcgacaagctgcgcgaggtcatcgtcgacccgtccgacgacctgcggcagaagaacctctcggggctgtgctccgagacgctgctcaagccgctcgcgcgcgacggccgcacggtgctcgacgcgtccgaacgcgacgcatgggcggctcgcgagcgtgcccaggcgggcctcgccacgctcgacgagagccagaagcgcatgctgaacgcccacacctatccggtaggcctcgaatatggtctttttgagcgccgtcgcgatctggttgtgaagctgcggggcatcgcgtagtgtacgagggtacgtcatcgactggttcgggcgcctgtgccccatgtcaaggaaggatgtcatgatcaagatactcaccgattcggtcgcctccattcccgccgacgtggcgcgcgaagccggcatcgacgtggtcaccctgttcgtgaaccgcgagggatgcgaatacgcggactctgagatggatttggacgcgttctacgccgacatctacgacatggtggacaacatccccacgtccagccagccgtcccagcacacgctggaagccgtgttcgaggaggcggcgcgcgcgggcgacgaggtgctgggcatcttcatctcgtcggagctgtcggggacctacgagggcgccgtgcgcgcagcgcgcgccgtgaaggcgcgcaacatcgacttcacctacgtcatcgtggactccacgtcgtgcggctacgacgaagcgtggccggtgttcgacgcggtggccgcgcgcgacgcgggcgaggacctggcgggatgcgcagcggcggcgctgcgcggcatcgagtccacccgcttcctgttcacgcccgaaacgctcacgttcctgcaacggggcgggcgcatcggcaacgcggcggcgctgctgggcaacctcatccagctttcgcccgtgctcacggtgagcgacggcaaggccgacacgttcgcgaaggtgcgcacgcgcaagaaggcgctcgaccggatcgtgaccgagttcaagaaggatgtcgagcagcacggcctgaagcacgtcgtggtgcactacatcggcgacaaggcgccggccgtcgcatgggcgcgcgaggtcgtcgagccgctcatcgggcgcacggtgagcgtgttgccggtgagccccgtcatcggcctgcacgtgggaccggccgtggggcttgcctatgagtgcgcaagcgccctggccggcaagatcagcggcccggtgcaggcgcgcgcctgcgcttcgtagagtcgcgcgatcgtccgataccgtatgcaaaccgctcagaaagcgagaaacgctcatgcagcataagtgcaacctcatcatcgattcgtgctgcgacctgccgttcgaggtcgtcgaccgggaaggcgtcgagcttatcaggttcccctacatcatgagcgacggcgagcatgccgacgatctgtaccagacctcgtcggcgcacgatttctaccaggcgatgcgcaacggcgaggagcctaccaccgcgcaggtgcccgtgcccgtgttccgcgacgcgttcgagcgcgccatcgcaagcggggtgcccaccgtgtacttgagcttctccagcgggctgtccggcagcttcgatgcagcggcgctcgtgcacgaccagctgatggccgagcatccggacgccgagctgtacatcgtggacacgtgcttggcctcggtggccgaggcgctgctggtgtacgaggcgctgcgtcagcgcgacaacggcatgacggcgcaggagcttgcgcgctgggccgaggaggcgcgctacttcgtggacgccgagttcatggtggacgacctggaggccctgcgccgcggcggccgcatccccagctcggtggcgtacgcgggctcgaagctggacgtgaagccgctgctcaccatcaccgtcgacggcaagctgtcgctggcgggcgtggcgcgcgggcgcaagaagggcatcaagcagctggccgagtactacaacaagcgcaaggccgactcgcggccgggtcgctgcgtggtcatcggcaacgccgactgcccgaaggacgccgctcgcctgcaggaggcgctgggcaagggcgacgacagcatcctgtttctggagagcagcatcgggccggtcatcggcagtcacgtggggccggacatgatcgcggtggtgttctggggcaacgacaagcgcgaggagctgtcggtggccgaccgcatcgcgaagaaggtcaagggcggcgagtagcccgcgcgcgagcggctcgcgacacatggaattcgaacgcatcgggaaaggtgcttagatggaactttcgttcgtatactccggcaacgagacggtgggcgctatggtggtgtcccgcctggaggcggccggctgcacgcgcaccgacgacgtcgcgcatgccgaggccatcatcacgtactgcacgtcgcagacggcgctggaagacgcgtacttcgacgagcaggggctcgtgcaggcggcggggaagggcgcgctgctcatcgacctgtcggcgtcgactcccagcttcgcgcgcgagctgaacgccgtggccgtggtgagcgacctcatgtcggtggaggcgccgctcgtggtggtggacgtggcccgcgccgacgcgttcggcgaccgcgacaacctggtgtgcttcgtcgggggcgacgaggaggccgtggcggaggcgcgtcccgtgctggaagcgatcgccggcacggtgcaggaaacgggcggggcgggctctgcgcagctcgcgcgcgccgcgtacacgctgcagacgacggcgcaggtgatctcggccgtggaggccgacgcgctgtaccgcgccgtgcgtcgctcgtcggcctcgctcgaccagacgacggagcgcgtgggtgcggcgacgcccgtggccgagcaggtgctggccgcggtgaacacggggcgtttcgacggcatgtacacggttgagatgttcatggccgagctgtccgccgcgctgacggcggccgacgacgtggacctcatcctaccgcaggccgaggcgtgcctgcacctgctggagctgctcgccgtcatcggcggctccgacaaggcgcctgcagcgctggcgctggtgtacggcgaggagaagacgtgcgccgagcagggcctcgactggacgcgcgccgagcaggcctacggcgacgtcgccgagggctttgacgacctggacgacgacggccacgaccacgggcacgaccacggttccttcggcgattatcccggctacggcgcgtattcggccaattagggttccgtcggcctacggccgacggaccttgccgacgctgcgggcggctgtggcacccgatctcgccgcgaagccgaggactcgcgtaccgaaatatcccctgcggggacttcttgcaggatgcgcttcgtcctcgccttcctcacgatctcggacaccacagccgccctctctgacattattggaccggtgagtctatgaatctgacattatcaacatgcgacctctgcccccgctcgtgcggggtcgatcgggcggcgggggagcgcggggcgtgcggggccgacgggcgcctcgtggtggcgcgtgcggcgctgcatttctgggaggagcctcccatcagcgggtcgcgcggcagcggcacggtgttcttcgcgcactgcccgctgcgctgcgtctactgtcagaacgcagtgatcgccgcgggcgaggcgggcgcggaggtgagcgtcgagcgcctgggcgagatgtgcctggagctgcaggagcagggcgcgctcaacgtcaacttcgtcacgccgacgcattacgctcccgaggcgcgcgcggccgtcgcctgggcgcgcgagcgagggctggcgcttcccgtcgtatggaacacgtccgggtacgagacggtcgccgccgtgcgggcgaacgagggcacggtcgacgcgtacctcgcggatttcaaatacgccgacgccgagctggcgcggcgctattcgcatgcgcctgattaccccgaggtcgccctggcggcgctcgaggccatggtggaggaggcgggcaggccgacgttcgacgaggtggacggcgagccgcgtctgactggcggcgtcgtggtgcgccacctcatgctgccgggcgcgctcgaggactcgaagcgggtcgtgcgcctcgtgcacgagcgcttcggcgacgcggtgctgctgtcgctgatgaaccagtacacgcccgtgctggcggacgccgcgaaggcgggcgacacgcgagccgcggcgacgctcgaccgctgccccgagcttgccgagcgcgtctccgacgacgagtacgagcttctgctcgactacgccgacgagctgggcgtcgaggactacttctggcagcagggcggagccgccgaggacagcttcatccccgcgttcgacctgtccggcgtgcgggagcccgatcgcgcgtaaggcgggctctaccctccctccctccctccctccctccctccctcggccgtccttgggcgcattcctccgctccgaatggcgaaaaagcatcgaattcggaagtatcgaagagggttgcgcgtgcggaggcgagcttgctttggcatcgccgcaggtcgtggaagcggctggattccaacgaggcgcaccgggcgggttcgatgagcctcgtccttccgaattcgatgctttttcgccattcggagcgcggggggatgcatgggctgacgttgccgggacgccgcccctgccgtatcttgcctggtcttgtctgctttgcgcagcagagcgatggttggaacaaatgtttcacgtgaaacaatctggcgaagacctgcggctggaaacggcatttcgaaagacccgccttcgggtatgcgggggcggttgatggattcatcgcggttgttccgacggggaaacgggtcggcgccgcgttggcatcttgaccgtcgacgcgaattcggggttcgcgcgcgaggacggcctgcctgcggttagccgttggcggaaagagggggcggccgcttcgccgacgcgcttccgaagtccccatcccgaagggcttcggatccgcatcgaatcgcgcggtgacgtggagggctgccgcttcgcagggacgcgcggacgttagcgcggggagatttcctttccggggaggtcttcctgcatctcggtgatgttcttccagaagcgcttgggcatgaactggcggcgcagctcggggttgtagcgggcctcgacggccacggtgtcgtagaagcgcttccaggcctgctgcatgaggcgttcctcggacgcgcggtcgggcaggtcgacgttctccgtttggacgaggtaccagtcgcgtccttcgtagacgccggcgatgttgtgcgcctcgtcgaagatgatgaagggctgcgtgttgaagcgcccgctgaaccagtccatgagcagcgggatgaccgaggctgcggggttgcagcgcgcgaaccacacgccgttctccagatgctcgaagcggaggaactgcagcatacgatgccgctcgttcatgacggagcgggcgaggcggtggagcggctcgacggcagggtgggcgaggtcgcccagcacgctgcggcgggccttgcccgtgcaggcgaacttcccgcacgcgccgccgcatgatccgcggcgcttgcagccggagcaatcgtgcggcctgctctgcgccatggcgtagcggatgaagcggtacacgatggtgccggcgtccgggtggtcgctgagcgaggcgtgcttgacggcatcgtaggcggcgtctccgcacgccctcctgatgccgcgccgaacgcgcacggcatgctcctcgttcgtctcgatgacgcgcacggtttggccgagccgcggctgcaggacgtcggcgcgggcgacgtcctgcgggtcctcgcggcgcgcgtacgcctcgaacacggcggacagcagaccctcgagcgagccgtcgtggcagtaggcgacctcggccaggggttcttcggggaagaggggcgggttctcggcgggctttcggctcatgcgcacacggcttccggcgtttcgagggctcgctgccatccgtacgtcccgtcggcgctcgcggcgcggccggacgacgacgcctcgttcgaggagcgctccgcatcgctgcagcacgccgctgcggccgcatcgccgctttccagagcacgcgcgcccgacccgcctgcgatgcgggccttctcgggagtctcgacgctctcgaacaggctcatctgacccggagtggtcttgtcggcgcggcggccgttgttgccgcccttgatgggcgcggccagctgcgcgcgcagcccctcgcgggagaagtcgacgccctggcctgcgtagccgccgctgcacgtgatgaagaagcgggcgcgcttgtaggcgatgcccagcttgcgcagctccggctcgcgcaagcaggcggtgcgccgtgcgcgcacgatgaggttcgcgccgcgcacgccgatgccgggcacgcgcagcagcgcctcgagcggggccgtgttcacctccaccgggaagaagtcgaggtggttgatggcccagttcgccttcgggtcgaggtcggggtcgaggaacgggttgtcctcgtcgatgatctcggccacgtcgaagcggtagaagcgcagcagccagtcggcctggtagagccggtgctcgcggttgagctggatggcgtcggtgccgggcaggcgcttgtcgtcgttcacgggggtgtaggcgctgaagaacacgcgcttgagcgacagcgtgcggtacagcgccgccgacaggttgaggatctggaagtcgctctcgggcgaggcccccacgatcatctgcgtggactggccggcgggcacgaaggcccgctccttcttcttgggtcggacctgtttcatgtaggtggtctgcttgcgcacgagcgcgcgcgtgtccttgtcgacggcgatgttgtcgcggatctggcgcatgggcgcgatgatgcgctgcttgtccttctcgggcgcgagcagctgcaggctcttctgggagggcagctccatgttcacgctcatgcggtcggctaggtgccccagctgctgcacgagctcgggcgaggtgccgggcaccgccttcgcgtggatgtagccgcggaagccgtgctcctcgcgcaggatggagagcgtctggatcatgagctcggtggtgtagtcggggttgcggatgacgcctgagctgaggaacagcccctcgatgtagttgcggcggtagaacgcgatggtgaggtcggccagctcgcgcggcttgaacgcggcgcgcggcacctcgttcgacacgcggttcacgcagtaggcgcagtcgtacacgcagacgttcgtcatgagcaccttgagcagcgtgatgcagcgcccgtcggccgcgaagctgtggcagcagccggcggccagcgtgttgcctagcttgcccttctgcgcgtcgcggtcgatgcccgacgacgtgcaggcaacgtcgtacttagcagcgtcggcgagaatctcgagcttggcaaccagatccattcgtccatccgttcgtcagatcaaatgttcgcgggaatgtttgttcgtatatagtacgcaaacgagtgttcgaagtcaagggtagggaagaggagtcgaacccggattcttccgctccttgcggcatgcggcggctgggctggtttttcggagctgctggagcggcgtctcgcatgaagcgtgcggatcggctttagttgtccgagggcgcttcatgctttccgacgaacctgcacgccgtgcgttctcgcgtttccccttgtctctcgacggcccggaggattcgcttcgcgacgagcaagggtatactgatgcttgcatgatatggaaacgagagcgaaggagcgggcgatggtggcggtgctgtgcgtgggtttgggcggcttcatcggatcggtagggcgctatctgctgggcctcgtgccggtcgagggcgacttcccgctcatgacgttcaccgtcaacttcgcgggcgccgtgctcatcggggcggtgttcgaggccgccacggagggctccagcttgcccgacaacgcggtgttgttcctcaagaccggcgtgtgcggcggcttcaccacgttttccgcgttctcgctggagaccctcgccctgctcgaacgcggcaagtacgcgacgggcgcgctgtacgcatgcggaagcgtgctcgcttgccttgccggcgtcgtgatagggcggctggccgtgcgcggcgtgcgcgccgccctgaccggctcggccgcggcgtaggggcgggcgccgcgctctgcgcgcacgcccctacgcccttcgatctcgcgcccgccgagcgggtcgcgctatttcgcgcgggtcgcgttgcccggatcgatggacatgctctggaagcggttctccatgtactggttgtcgaagtgctcggcgaagaagtgcgccacggccgtctcgggaggttttccagcctcgcgctggtaccagcagtcgagcgacagcagcgtcatcgccccgtcgacgatcatgagcgcggcgcacaccgtggtgaccgcgtagcgccagttccaagggatgaggttcaccagcttcaacatccagggaagaagcagcttgatccacaccacgcccaagacgccccacatggccatgaacatgccgttcgtgcgcccgtcgatggacaggaacgtgccggagtagtcccacgccacgatgccgaaggcgaactgcatgaaccagctggtcagatactcgaacgccccgccgatgacggcgctcaccaggaagatgagcacgacgttcttgtcgtggaatcggttcagggcgaccgtcatcagcaccgcgccgaaaccgtagatgggcgagaacgggccgaacagcaaacccgcgcgatcctggtagtgccctggattcacgacgaggaagtggtataccgtctcgatcatgagtcccagcacgcagcacacgacgaagatccagaacaggttgaagaagttgagcgcgatgaagcccttgccggtctcgtcgcggccgagcgtgccttcctcggctgcctcgcgcgtttccatgtcgcgcagtttgcggcgcagctcgcgctcttcggccagcgacgggtccacgtagctcgacagcgcgacgagcacgaccagcaccacgccgtaggggatgagatcgggcgtgaggccgctcagcatcatgtcgcagaggatcacgaggatgaggatgacgatcatgacctcggcgatctgggccgtgcgacgccgtttgtcgcgcagcagtcggatgcccaggatgacgaacatggcggacaaaaccgtcatgagcaccgcgtcggagacgaagatgacgagggcggcggcggacagctcctcgacgatggcgccctgctgcagggccatcaccatgccgacgatgagcagcgcgagcaccggcacgagcgctgcgccgctgactatgcacaggatgccgaacaccttgagcggaagggggatcttgctattggacgcaggcgcgccttcgtcgaggttgagtccgttctcgacgcggtcgtgcttacccatggcgatgttctcctcgaatgcgcttctatctgtctcgccaaagtatagccgaagagcgggcgcctcgcgcggcgactacgacgaggggcgcggctcgtcgggggcgacctcctctacgaaccaacgcggaccctcgtagaacaggtacttctcgcggccgttcacggacacgaggtagcggatgcccgtgccgcccacgcgctgagaagcgcgtcgaatggcctcgtgcacgcggtcgatggcgaagatgcggccgtcgcgccagacgatctcgagcggcgtgagccgtccgtctacgtcgatgcgcgccgtcacctccacatatgttttccgaaaagccatgaccgcaggaaaccacgccgaagcgcgacgcgccaggggccgctccgagctgtagcgcaagggatggcgacgcgtaagcgagcgagggcgccaacgcgccgcaggcacgggaaggggcgctcaacgcgccccttcccgctccctcttctttttcgatgcgttcgatcctctactcgatgtcgttcaattccttgccggcgtactcgtgcgccgtgaacagcaggatgatgcccgccacaaggcagatgcccatcatgtagtacgcgggcataaggccgttgcccgtggcgtcgatgagcgcggtggccaccatcgaggccgtgccgccgaacaccacgtaggcgatgttcgaccccagcgcggcgccggtgtaacgcacttccgtggggaacatctccgcctggtagcaggcgatgttcgcgtcgttgaacgagagcgtcacgcacatgatgagctccgctgcgatgacgatgggcagctgagccgtctccagcatcatgaaggcggggatgctgagcaggatgaacgccacgcacgagcccagcagcattttcttacgtcctacgatgtcggatatctttccggcgccgaagatgatgaagatgtacgtgaccagcgcgatgtcggtggcaagctgggccgccgaggcttccatcgccgtgtagctggtcagatacgtgggcaggtaggtgagcacgaggtagaagccgaccgagttcaccatggtcgccgcgatgctggtcgcaaggcgcttcttgtacttcttgaacacgaggcgggtaggccgcggggcctctttggccggatcggccgtcgaggtcatctgctggtaggtgggggaatcctcgagcttcgtgcggatgtagtgcgccacgagccccaggggtccggccagcaagaacggaatgcgccatccccatgagatcacgtcggcttcgggcagcagcgccttgatgatgagcgctgcggtggagcccgccaacaggcccgccgcggtggatgccggcacgagcgagcagtacttcccgcgatggttcgccggcgcgtactcggccaggaacaccgctgctcccgagtactcgcctgcagccgagaatccctgcacgctgcgcaggcacagcagcaggatgggggacagcaggccgatcgtctcgtacgacggtaggcagccgatgaggaacgccgcgcccgtcatcatgaagatggacagcgacaacgaccacttgcgccccttcttgtcgcccatgctgccccagaacgccgcccctaacggccggaacacgaacgacagcgcgaacaccgcgaacgcgagcagcgtggagttcaccgccgactcggggaagaacacgatgccgatggtgatggcgaaatacgtataggtggcgtagtcgaaccattcgatgaagttgcccaaaaacgaagagatcgccaccttgaacggcactttcggttgtgcctccgttactgctgccgcgctcatcgcgacacctccttcatcgattcgtcgaggccggctccgtcggggacgtcgacctcctcatgccgcgtgagccatgccttctcggcttcgcgcgcctccctctcctcgtgccactgacgcagctgccgggcagcaagcgagtcttcgggaaacggctcggccaggccgcgttccaccagctgctcgtcgtgcttgacccatttgaagaactggactcccatgaggatcacgatgacgctgaacgggatgccgccggcgatggtggcgaattggatggtgctgaggaagtcctgtccggctgtcaccatgaacagcacggcgagcgccgtgatgcacagcgccagcagcgccttgaagccgcggctctggcgcgcggcgggagacacgaagttcgacagcgccatgacgccggagtccaccgaggtcacgatatagccgccgatgaggatggttgccagcacggtcagcacgccgccgatcagaggtacgctgtcgatggtgaggaacagccccatcgaggagtcggcgttggtctgcgccacgatgccggggtcggacatcgccgcccatacgccggtgccgcccaccacgcacgtccatacgatgcatacggccgcgggcacgaacaccacgccgcctacgaactcgcgcagcgtgcgcccgcgggagatggtggacacgaagcccgccgtgaacgtggcgaacgcgaagcaccagcagaagatgaagaacgaccagaacgcctgccaggaatcaccgtacgaggcgatgcccgcgcccaggttcacggcttcggtgaacccgctcatcagcatgaactggtcgatgaacacgctgagcgactcgggcagcacgcccaggatgtacagcgtggggccgaaaatgaacacggcagcgacgaacacgatggacatgacggcgttcgcgttcgagatcttcttgatgcccctcaccacgccgaaccacaccgacatcgttgcgatggagccgaacaggatgacgaacgccacctgcagggcttgccctgtctggatgttgaagatctgttgaataccgctgttgaactggtacgatgcaagtccgagcgacgtggtcagcccaaagatggtggcgatgaccacgaggatctccaccacgatgccgacgggccgcttcgcgcgggcggggaacagatcctccaccgtgccgcggaacgtggtgtccttgtgcatgttgtagcgggcgtaagccatgaaaagcgagacgatggcgtagatggcccacgccgggatggcccagtggaagtacgtccatgcaagcgccgtgtctccggcgaacagggggtcgggggcgttgaacggggtgcccccgtacatcatgataggctcggccaccgcccagaacaccaggcccacgccctgcccggtggcgaacagcatcgcgaaccaggagaagtacgagaacgcgggcttggcgtccttgccgcccaggcggatcgaaccgagcttcgtcaccgctacgaatatgcatacggcgaagcacaaaaatgcgcacagcacgatccaccagctgcagtactgggtgacgaacgtgcgcagcacgccaaccgcgttgatgaacgtgtcggcgctgaccagcgcgatgcctagcacgacggcgacgatggccaccgacgcggctcggatgacatggtcatgcctgaccgtgcgtccgagccgtgcggcctgggcttccttcggctccggatccacttcgcccgactcgttctccacctccatggggtggacgtgcttgcgcgcgtcgtcgtccgagctcttagacctcatggtagtcaccctcgcccgagaactcgtgcttcacggcttccaccatgtgcttcacggcgacgttgcgcaggatcgcccccttctcgcgcgaggattccacgggcgaggacaggcagcccgacggcggcgtgtagccgggcacgatgggcagcacgtcgtagttcggcagctcggccggcagcccctcgtacagcgggtcgtcggtcttgcccaggtcgacgaggtcggggtggaacagcagcatgagcgacgtctccatgacgccggcgtgctccagatcccagccggtgaagccgtcgggatacagggcctcgatggtctcgtcgtcgacgaagtcccagtacgacaagagttggatcttcacgtcgcggatgccgttctcgcgcgctttctccagcgccagctcggcgccttcgaagatgaactggtagttctcgtaatgaccgttcatcagcacgatcttgcgcgcaccatgcaggatgaggccgaacaccacgtccttcgccagcgcgatgagcgtcgttcccgacagcgacgtggtgcccgagaggtggaagccgccgcccgagcgctgctgggagcggtagccgtagttgatgggagcggccacgacggcttccattgcgccgtccgtgtcggcgacgagcgcctcggcggtggcgccggccatcgccttggtcagcgcggcgtccacgcacatggccatgtgggagccgtgctgctccagcgcgccgacggggatgaacaccacggcatccttcgccagcttctcgcggtaggtgaacgcgtccatttcctccatgtacacagtgggtttcatagcttgtccctcctcgaatcggaaggagcccgccatgcgcggcgggctccgatgtcgtcagcgcttggatcagtagtcttccagcaggtcgacttgggccttgctggcgcgcaagatgaagttgcgcttggcttgggcaccgccctgcgccagcttgcgcaggatgaagcgcttgaggcgcgggtagtcgctcatgccgtaccaggcgaacgcggtgccgcccgtgtaggcctccacgatgctgtggacgggcaggccggcgtcgcgcttggcgtcgagggccaggtactcctggatctcggccgcgcacacgtcgcggatgacctcggcgctgatctccaggtcgcgcgccagctgcctgagctggtaggccacctccgcgtcgtcggcgtgcgggaagtacgtcacgtcgtaggtcaccgcggacagcccggacgccttggcgaagcccagcagcttctccagcgacagcatctgcacgtggtcctccgtgcgctcggcgatgtcgagctcggccgggaagccctggacgccgctcttctcgaacacggcgagcagctcctcctcgttcaacggcgcttcgaactcgatttcagtggcaacatgggtcaggttgctcgtgatcttcataggtgcacgttcctttcctggcaatcggctcggctagctcaaggcttcccgttcttgctcttgatcgagccgcgcttcaaggttctcgcggatctcctcttccttctcgatcttctctccctgtttgctcgcagctgcggtggagaagaagatctgggcaacgccgccgatgacgatgagcgcgccgccgatgatctggaaggtggtcatggtctcgccgaacatgaacaggcccagaagcgacgccatgatggtctcctggtaggagatggcggccagctcgccggccttaaggcgcttcgtggcatgggtgagcaggtagaacgcgccgaagccggtgatgagcgctgcggcgatgagcacgacccaggacgagccgggcatcgtgaacatgttccacgcgtgggtgatgatctggcccgaggcgtcgaactgcgtcacgccgttgatcttctcggtgtaggacagcggctgcaggaagaagtggtgccagacgagcagcacgacgatggacagcgagccgaacaggaagttccaccaggagcggacgttggagtcgcagtcctcgcggtagcgcgagaagaacaggtacaggccgtaggccacgccggaagcgaaggcgatggcgttgccgaaggtgtacttcggatcgaggtcgagggtcagaccctcgggcgtgacgatgccgacgatgaacagcatgccgacgaccacggcggcgatgcacaggacgcccttgatgttgagcttttccttcaggaagatcgctgccaggatggttgagtagatggggccggtgtagatgaggaacgatgcgttcgccagcgtggtgtactgcgtagacaggcagtacaggccagagagcaggcccaagaacacgccggagagcagcatcatgccggagaaacgggtttccttgatcttcttccagcttccgccgacgaagcagaagatgagggagagggcgatcaagcctgcgaagttgcgccagaacgacacgaagtcgccgggtgcatcgatgaagcgggtgaaggctccgataccgcccatcagcgacgatgatgcgaacatcatgacgaagccgataagcttgtactttgcttgttggttcatgtatccctccttggagcggagtcgtgtcgaccgggtccttgacggggacgccttgcccgtttgcgggcgaaagggtaggggtacgacgaggcacgcggacgctgcggcgccgctttcgacatgaatgtgatgatacgggagcaaatcggccggcctctgggagacgcttcgtgcaaggaacgccgtcgcattgcacgagacgggatcctcggaggccggaacttcgggatgaaccggggctcgctgcaaggggagcgagccccggtatgggctacgcgactagtcgttccacatctccgggcgaaccagggtcgggtcggcgacgcggttcgggaagtagtcgaggcactcgccctcgcggtagacgtcggccgtggagcagtgcaggccgccgccgaaggcgtaggcgccgcgcaggtcgacggggatgacgttcatgccgagcttgtccatctcctcctgctggtagacctcggaggcctccacgatgaccgtcttcgggtcgagcaccaggcagttcatggacagccacacggagctgtagcagaactcgggcggctcggagtgggccggctgggcggcgtcgacgatctgccagtcgttggcctcgaagatcgcgcgctgctcctcgggcagcttgcgctgcgggttgttgatgatcaggccggggcgcagcggcacgaaggtcgcgtcgatgtggatcgggtaggggtcgcccgggaagttcacggcgtgcacgcggtgctcggggtagtagcgctggaaccagtccatggccgtgcggttcgtggtcaggccgtgctggatgaacaggtccttgcccatgcgcatgacgtcggcggcgtcccacatcggctcgacttccgtcgtgacgaagtccttgttggcggtgcgcaccaggcgctcctccagcgagatcttctcgtcgtagtagttgtgcttgtaggacttgtcggtcaggcgcgggcgcggggcctgggtccacaggaagtccgggtcctcgtcgaagtactgcttcatgagcggccagtaggccaggtactcgaagtagcggcagcggaaggagttggcggaggccatgatctcgttgcccatggtgagcaggatgtcgcggggcggcatgcaggtcatcatcgagtcgttgcggaagtcgggcgtgccgatggcctggttccactgcaggggcgtcgggcggtcgacgaccacgccgcgctcctcgagcgccttcacgaggttctcgaggcaggcgttgccgacctcgaccgtgcgcagcgggcggagaccccacatgccgcgcatctcggagtcgaccggcaccttctcggaggtcgcgggctcctcgggcgggatgaccgagttgtcgcacaggccgacgatcacgcgcttcagcggatcccagtcgttccaagaattgactatcttcgccatgacagtctcctttctccggcagcgcttccggcgccgccttcaaggtcttcgggtggcgtgtccacctctctgtgaagatattgtgatgggctgggaaacgctattcaaagggcgcagtccgttcggtgtcgcggtgccgttgcacaaggtcatccgtatgtccgagttgcggaattaaagaatatgattgtcaactatgccggacaattgtgcaagaatgtaacgtgctgtcaggcgtttcggtgcggtatgtttaattcggttgacaggtttcttgcaggttcaagtcggggtgctctaagaggaggctttgtatgctgccggatcttgctcatggacaggacatcttcggatcgcccgagctgcgcacgaagatgaagatactgcatgccgtcgacaaatcgctcgatcgcatcacgatcgccgagatatgcgagaacgcgggaatatcccggcagacgttctaccgccattttcaaagcaaatacgacatcccttggtggcattccatcttctgccggcagttctacctcaacgagatagggcgcaccatcgattggaagacggggtactatcatcatctccggcttatcgcgcaggagcgcgatttctaccgcaagtccatccagtacagcatcaacacgcccttcggccagaccgttatgcccgagaaccgcaagacggtgctgttggagacgctcgagaagtaccgccatgtgaccgtgaacgacaacatgcggttcatcgtggagatattctcgaagctggagtgcgaggtgctgaacgactggttccgctcggatgcgcccaccgacctcgtgcgttggaccgacgatctcgtgagcctcgtgcccgaccgcctgtaccgcgcgctgaggatcgacgagccgggtggaacctcggctggttaggggcgccgacgtcctgcggacgcagcgggggagggtttggcgcaacgggcgcgcatcatcgctcgaaaaacacgttttcggaagcgattccgtgtttttcgagcgatgatgcccatcatgcttgtgggcgttgcgggaaacgcttttccggaagcgcatgatgtcgtacaatacgcacgcacgcgattcacgcgcacgccagtgtggcgcaacggtagcgcaacagttttgtaaactgtgggttgcaggttcgattcctgtcactggctccacggaacaccaggccaccggctctttcgtcggtggcccttttcgtagttaggggtagaacgcccctgacatacctacaggaataagctgcctactccaagaactcgctgcgagcctatccctcgattttgcaaggcgcgcggctggagcgaattcgcgatcgtcggcaccccgccgcgcaagaaggtcggcggttttcggcggtaatcgacgcgattccgtcgttcgtttggggcgacgctgcttgcggcgggctttctcatgctggttccggcggccaacgcgtaggatgcgcgaactgttcgcgggtttcacagagccttctgctcgccggcgcgctatactctttcgaatgaaatgcgtagggggacggtgagccgtctcggcctccgaggctttcgctcgggaggcaggcgagaggagtgcgatgaacccgctgttcgacgaagcgctgtcgttcgtgagcgacacggtgcgccggttttacgccggaacgggcatcgagcaggtggttgagcgcttttccgacgatctctcgtggataggagcgggcgaggtggaattctcgaccagcgccgaagagatcgtgtcgtatttgacgaagcgagcgccgcttgcgcctccgtgcgaggttttcgacgaggagttttacctggtgaacgtcacggagtgcagttgcaccgtgatgggtcgctacaatgtgcgcacgcgcgaggactcgcagctggtgatcgaagagcgccagcggtgcagctacgagctggtggatgcgggcggagagctcaagatccgccatgtccatgcgtcgaatccctatcgggcgatgagggacgagcggtacttccccttcgaggccggcaggcagacctacgagtacttgcagcagctcgtacgcgagaaaacggccaccatcgatctgctcaccgacaacatcacgggcggcctcaagatgagcgaggacgacgacgtgtacacgctgtcctacgtcaacgagggtctggcgcgcatgctcggctacaccatcgaggagctgatggaggtgagcggcggcacggcggcgggcatggtgcatgctcccgatcgcgcgcaggcgctcgccgatgtcgcgcgctgcttcgccgaggggcctacgtacgagacggagtaccgcgcgcgccgcaaggacggtacgctggcgtgggtgctcgattcgggtcgcaaagtgcaaaccgaggacggtgcggtgaagatcggcagcgtgctcatggacatcacgtcgcgcaaggaggcggagatcgcgctcgcggtggagcgggagcgctaccgcatcgcgctgcgcagcgttaccgacgttctgttcgaatacgatatcgagcgcgacgtgctggtcgagtacgagcgcgcgcccggcgcggacggcagcgcgcttcccgaggagcgtcggatcgagcgctacaccgagatgatcgcagaaggcgagcgcatccatcccgacgattgcgagcgcctggccgaggcgctgcagggcggcgagtcggtgacgctcgacgtgcgtcgtcgtttcgggggatcgccggaaggcgactggcgttggacgcgcatgcacgccatgatgctgtacgaccgcaacggagcgcccgtgcgcaccatcggcagctggcgagacatcaccgcggagcgtcgtcagcttgaagacctcgccgaccaggcgcgacgcgatcctctgaccgggctgttcaatcagagcgccacctccgagctcatcgacccgctgttgcgcaccggtgcgaaacgcggcgtgggcgctctgctcgtcatcgacatcgacgacttcaaaggcgtgaacgatacgttcggccatctggccggcgacgagctgctgtcgaacgtggcgcggtcgcttgaagaggcgctggcgtcggacgacgccatcgttgcgcgtatcggcggcgacgagttcgtcgcgtatctgccgcacgccgatctcgttcaggcgcagcgggctgctctgcgggtgaacgggcaaagatgcgaaggccgcgcgctcgtcacgctcagcgtgggcggagcgttggccggtatcgacggaggaacgtacgaatcgctgttcgacgcggccgaccgtgcgctgtacgaggcgaagcgcaagggtaaggatcgcgtcagcttcgcgggcgaagcgcgtccttgaacgcggcggcatcgtcgggcgtggtcttgatcgcgcgcacgaggcggggctttccggtgaggccgcgcacttcgaggggttccgccagctcgatccacaacgcctgcccgcccatggccgccaggttcagaagctccctcttcgggacagcgggatcctgggaaccgacgcgcgcgatgcggtcgagggggatgcgctcgcagacgagcatgccccagcgcgccaccagctcgacatcgtcaaccagaagcgggttcagcacgacggcgcgggcttcggcgaccatccagaggatcgtgtagagggagagcgcggtcagcacgcatgcgaccgcgacgctgaaccgtgctgccaacaggtgcgcggcgaccgtttcgacggcgatgagaaccagcatgacgccgaccgcggcgacgtagccgctttgccggtgggacgagaacgcccggtagccgtgcggcatgtgcggcgcgcggcgccacgaagccgacgcgtagtaccacatgacgcactcgagcgccgccatgcgcgcgacccgctcgttgcgaacgagagcggaaaacgcgtccgagaaccagtcgagcgggttgtccgaggatgctttcgccgtgcggaagcggcggacgaggcggaggacctcgcgcgcggcgatgcccagctccactccgacggcgcacaggccgagcggcgccagcagcgacggcttgccgggtgcggcgaactgcagcgacacgaggcctcccagccagatgaccggcagcaccagcaagggcgacagcctgtagcgtcgcaccacgaggaggtagaagaccgccgggacgaacaccatgaggtcgaacggcaccgcaaagcccgacgcgaagtcgaatccggttgcggggacggttgccatgcaggcgaggtcgatgccgtatagagcaaggcaggcgagcagggcgatcgcgatgcgcggcagggcgcgggagggtggcgcgggggttccaacgggcgcgaacggcatggggcctcctgacgtgtgcgtgacgatgctgctcttcgcatggtagaccatgacgcagcgtcggggtcaacggggatacgccgtcggtggctgcggaatcgcggaaaacgttccggtctttaacgaatctttataaaccgggcgcatcctgttctcaggcaagagaaaggacaggctctatgggattcatggtggaaacgaacgatctcacgaggacgttcaaagggcagaaagcggtcgaccgggtgtcgctgcatgtgccggaaggatcggtgtacggccttttgggaccgaacggcgcggggaagtcgacgctgctcaagatgctgtgcggcatgctgcggcccacctcgggcgagatcgctttcgcgggtcgtccgtggacgcgcgacgacttgaacgatatcggggcgctcatcgagtcgcccccgctgtacgacaacttgacggcgcgggagaacctgcgcgtgcgcacgacgcttctgggcgttcccgaaaaccgtatcgacgaggcgctggccacggtggggcttcccgaaacgggcaggaagcgcgcgggccagttctcgatgggcatgaagcagcgtctggggatcgcgctcgcgttggtgggtcatccgaggctgctgatcctggacgagccgaccaacggccttgatccggtgggcattcaagagctgcgcgccctcgtccgctcgtttccggagcacggcatcacggtggtgctgtcgagccatatcctgaacgaggtggagcatatggccgatctcgtggggatcatcgtggagggccgtctggcctacgaggctccactcggcgagggcgtcgatttggagcgtttgttcatggacgtgtgcctggggaaggcggtggcatgatggaggcgcggacgaggccgttcttctcggtgttcagagcggaggtgctgaagggccgccgcggggcgccgcgcaaggtggcgctgatcgcgccgttgccgttctgcgcgctgggcgtgctgtcctcgggcgtcatttctggcacgggcgcgaccgggggtgtcgcaacgtatttgtggaacttctggtacgtgctcatgatgcccgtcgccatcgcgctcatctgcgtctcggtggcgaacatcgacgctcggcagaagctgcgttcggtgctggcgctgccgtttcccccggcgcgcacgtggtgggcgaaggtgtgctacgcgctggcgctggcgttcgctgcgaacctcgcggtgctggtctgttcgacggcgcttggagcgatgggcgttgatgcccccggtttcgccgaggggctggccgcggcgaccatcttgacggttgcgagttcgtggatggttcctgcggcgctggcgctgaccgtgcggttcgggacgcttgcgggcatcgcaattccggtgctgttgcagctgggcgcgggtatcgcgctgtactcgtcggcggcgtggttcgcgttcccgccggcgacgacgctctgcgccgtgtcgccgcttctgggcgtggcgccgtccggcgtgcccttggaggcgggcgaggcgctgggcgcgttcggttgggaggccgtggtcggcatcgtcgtggccgcggtgctgttcgccgtgctggcatgggctggggcgacgtggttctcgaagcgcgaggctgcatgatggccgggacggaggcgcgcgcgaaggcgcgcgaggccgggacgcgagcttgcgaggcggagcccggtcgggcgcgcgtgacgtttcggcgcgcgctgcgctcggaggcggttaggatgcgccgctcgccgcttgtggtgctgcatgtggcgctggctgtcgcgctcggtgcgctggcgggtgcgtacttcgcgttctcggcatgggattccctgctgggaaccgacgcgttcttccagctgctcggcgcgggcgcgccgcttctggcgggcatatcctgcggcttggcggcggatgccgagcagcgggcgggcgagggtgcgaacgtgctgggcgtgtcgtcgaggcgcggcgcgctggcggcgaaattggcggcgctgttggcgctgtgcctgatggctgccgctatcgcagccgcattgttctgcggcgcgctggcgctggcgggccgttcgcttcccgatacggctgcggtggcgcttgcgacggcgggcatcgcgttgggcagtttgtgctcgtacgccatcctgtggtgcgtcgcgctgcgcttcggtcgcaacgcctccatcgggatggggacgctcggtttcatcgcggcgctgacgctgatgggagggctggcgaacggcttggtcaccggcacgttcagcggagcgttcagcattggggcggccgcgttcgtgccgttcgcgtggccctcgcgtctggcttcgcttcccttggagctgtccatcgccgcgggcatgggggcgcaggcgcaggtcgaggccctggccgcggcgtacgcgaccgtgacgtgcgcatgcacggctatcacggcggtcgtgctggcggtggcgctggcggccgcgaaccgcttcgagaacccgcgtcgcagcggcgaataggaacggatgacctgaaggaacggggccgatgcctcgtgctacactcgtgcgagacggaaggaggaacgatggcctgcatactcgcggtcgacgacgacgaggcgatccgcaacctgctgggacgcgtgctgggcaaggacgggcacgacgtgcgctgcgccgcatgcgccgaggaggcgctggcgctgaagctcgaccgctacgatctggtgctgctggacgtgatgatgccggggacggacgggttcgagctgtgccgcgccatccgcggctcggtggatgcgcccatcgtgttcctcacggcgagaagctccgaggacgatgccgtgtacggtctgggcctgggggcggacgactacctgcgcaagcccttcggcgcggccgagctgcgcgcgaaggtggcggcgcacctgcggcgggagcggcgcgagcgcaagcacgcgctgtcgttcggcgcgctgcgtctcgacctcgcatcgcgcgaggcgtacgtgggcgaggccgccgtgccgctgacgaagaccgagttcgacgtgtgcgagttcctggcgcgccatcccggccaggcgttctcgcgcgaccagatcgtggagaacgtgttgggatgggacgcggaaagcgccgcgtcgacgatatcggtgcatgtggcgaacgcgcgcgcgaaactgaaggcggcgggcgccgagcccatcgacacggtgtggggagtggggtacaaatggacagcgtgaggcgggacgcgtggacgcacggtgcgaacggcgcgagtcgcggccgcggacgcaggtttcccttgggcgcgctcatcctgcgctacttcgcctacgtgctggcggcgctgctggcgctggcgctggccgcatacgtggcgttcggcttgctcgtcggaagcgggacggtgcttctggcgaactacggcgacacggccctggacgagacgtcggcgcagcttgccgcgctgccctccgccgatgccgacgcgatcgacgccgccgtgccctcggcgtacaggtgggcgctgttctcgccggacggcgcgtatgaagccggcgacgttgccgcgggcgcggttggcgacgcccgcgcggccgcgttcgacggcctggcgatcggctacgagacgttcggcatgacgcggtacgagccggtgaccttggccgacggctcggtatgcgtgctcgtgtaccagtatctgcctcagttcgcctcgaaggatctgcgcgacgcgctgccgaacccgcagaacctgctgctgggcgcgctcgccgtgctgtcggtgctgacgctggtgggcatcgccgcgcgcgccgcgcgggtgatctcgcgcaagatggagccgctcgcggacgccgtgcggcgcatcgaggagcgcgacctcgacttcgaggttgcctcgtcgcgcgtgcgcgagatcgacgacgtgctggccgcgatggacgacatgcgcgcctcgctcaaggactcgctggaggcgcagtggcgaggcgagcaggcgcagcgcgagcagatcgccgcgctcgcgcacgatttgaagacgccgctcaccgtggtgcgcggcaacgtcgacctgctgctggagggcgagctctcgggcgagcagcgctcgtgcgcggccgacgtcgccgagggcgcgcgccagatgggaacgtacgtgtccgcgctcatcgatgcgtcgctgggcgcgggcgcgacgttcgcgccgagggaggcgcggctgcggccgctgctcgagcgcttgcgagcgcaggtcgaggcgctggcggcggcgagcggcgtacgcgtcgcctggagcgagggcgcggacctgcccgagacgatgctgctggacgaggcgctggtggagcgggcggtggcgaacgcggcggcgaacgccgtcgagcatgcgccggccgggtcgtcggttgcggtggacgtgcgggcagacgccgcggccggctgcttggcgctgagcgtggccgacgagggcccgggcttctcgccggaggctctgagccgcggctgcgagcgcttctaccagggcgatgccgcacgcgcggcgcgcggccacagcggcctcgggctccacgttgccgccgaggcagccgcgcgccatggcggctcggtggaattggccaaccgcagcgccgccgagggcggcggcgcgcgggtggcgctgcggttgccgctgggccatgcggcgccgcaggagccggtcgggccgacgggctacgcggagtagagcccgtccttgttgaagcggtaccacgactcgacggcctcctcgggctcccttgcgggcagcgcgtcgggctggagatggcgaaaaactatcgaattcggaagaggtcgcgcatttcgtgaggggcggcctcgctctgtcggaaaagcccccttctatgagcaggcgttatggagaagagggtttttcggcgccccgcaggttggctcgcaggcttccgaattcgatagtttttcgccatcgcgtgcgctgccggatgctcgggcgcgccggcgctcggttagtcggcgggctcgaccttccgtgcacggttttctgcgaaatgctgcaagcttcctttcgcgtgccttccgcattcttccggttgcgaacgtttccccaggtcgcgtttgccgtgtcgctccgcgcgtcttcagctctctcgaaaacgcaacatttcgttcgaaaccgtgcacgagccgggagggcggattcttccgatcgggcgccgaggtccgagggcggggacaaggctcggaggagggtctttcgcactcgctcggttgacgcgcgcccgggaaagtcaaccgatgctcgcttgcgtcaaccgttcgcgttcctccatactgtagggcgggacgcgcgccgaacggaaagaaggagcctcgcatgcacgacatcaacttgggagccgccatcgcgcgcgagcgccgtgcggcgcaggtgacgcaaggcgagctggccgcgcacctgggcgtgacgaaggcggccgtgtcgaagtgggagctggagcaaagcatgcccgacgtggccctgctgccgcgcatcgccgcctacttcgacctcacgctggacgagctgttcgactatcggccgcagctggtgggcgacgatctgcaagacgtctacctgaggctgctcgcgcagttcgacgaagatcccgaagccgctttcgcgaacgccgaggacctcgtccgttcgcactactcctgctggcccgcgctgcagcagatgggcatgctctacgtgcagcgcgcaaccctcgaccccgaccgcgccgaagctttggccgcacgcgccgcagagctgttcgagcgcgtcgagcggcatgccgacgatgtggagcttgtgcgcgccgcgcggatgatgcgcgcttccgtcatgagcgtgcagggtgacttggacggatgcatcgccctgttcgaaagcctcaagcccgacaggacggcggcgaacatcgatctcatgctggccagcatgtaccagcagagaggcgaccttgacgccggcttgaagctgttccaggaatcgatgggctggtgcgtgatgaacgccataagctgcgtctcggcgcagatcccgctgtacgccgacgacgccgagcacctggaggcgctcctgcgggccggcgaaggcgtgctttccgggttcgatttgcagaaccagagcccgatgacggtgctcacgttctgcacgaacgcatcttccgcgtgtttgcaggcgggcgacgaggatcgagccgcgagctatctcgagcgctttacgtctttgctggaggagcttgacgcgcgcacgctggtgtacggccggaaccagagcgcgctgtacgatcgggcgcccgagctttggagcgtcgatcccggccaggagcatatcgcggaaacccggttcggcgcgatcgacttcaggcggcagtgcgcgcagatggtggcagcgcagcccgtctgggccgaacgtgccggcgattcgcgtttcaagccgctgttcgaccgactggaggccctatgagcgaagcggacgtgctgtatgtggaggacttggcctatcgctatggcaagacggaagtgttcgccggcgcgtcgctttcgttgcgggcgggcgaggtcgcgtttctcaccgggccgaacggggcgggtaagtcgacgcttctgcgctgcctggccggctgggacgcgcctgccgaggggcgggtggagctgtgcggaaggcgcttcgacggcgcggatcgcgcgcagcgaagcctgctggccttcgtgcccgacgtcccctcgttctacgacgaccttacagcgggcgagcatatccgcttcgtgcggcaggcgaaccgtatgagcgccgacgacgacccgtcggagcggctcatggctctcttcggcctcgacggccatcgcgaccagctgccctcggcatactcgcgcggcatgcgtcagaaactggcgctcgtgctggccttcgcccgcgcgccgcgcttgctgctgctcgacgaaccgtacgggccgctcgacccggacgcctccggggtgttgagcgggcttatcgaggaagcgcgcagcgccggcgcggccgtgctggccagttgccatcatgacgtgcccaacctgcggccggacgcgctgctgcgtctggaagacggccgcctcgccgtgctcgatgcgcgtgacggaggcgaaggacgcatggtgcggaacgcgttcggcgcgagcttcggaggcgacgatgcatgacgttcgcctgctgctgtggctgagagcgcgccatgcgcgctcggctctgaaccgaaccttgcacctcgtgggcgccggcgtcgacgacggcggctggggagagcgcgcttaccagctgtacgcggtgggcatcatgctcgtgtgggccgcgctcatggccgcagcgctcgtcgatgcgatccagggggtcttcgtcggcctcgccgccgccgtatgctcgctcgcggttcagggggcgctgctcgcggtggcgctcgtcctgctgcgcgtcggcatcgcgggcgcgcgcacgacgccgttgaagctgtcgcatcccgacatagcctatctggcggccagcgcggtgagcgcgcgggcgctcgcgggcgtgccggccggagtgcaagctttcgcaggcgcggctgccggggcggcgctagggtttctgctgggcgtggggttggagagcgcgtccgtgctcgcgggcgcgccggccgcggtggcgctcgcaggtgcggcgctggctgcggccgcggttgcgcttggctgggtcgtaggtttcgtccggctggcaagcgacggctggagcggatggcgcacggctgcggccgcattcgttctcgtggcgtttgccgtttcctggtgcggcgtcgcgctggccgcgggcgctgatgcgctgttggctcctgcgacgttcgcggttctttccgtgggcggattcttcgtcctcgccgtcgcggcgatcgccctcgccctgcttgcgccgcgcgtggatatgacgcgcgtcatcgacgagaactccctgcatgccgacctctgccagttcggcatgctgtcgcccctcgaccgcaacgacatcgccgaataccagcgtcgccgcaagctggccgaccgtcccgtgcggttctccctgccgcgcggggagggccgcctcgccctcgtgcagcgcgccgcgctgtcgcatgcgcgccagtacgacggccttgcgagcctcgtgatgcaaggtgccttcgtcgtgccgctcggggtgctcgcgctcctcggcgcgggcggccccgtgctgttcgtgttctggctgccggtggccgttctcatgccgcagggcgtgcgcgaggccacgcgggcgtttcgggacgacgcgcgcaatcgcctcgtgcgcgaccgtctgccgttcggcgtgctcgaactgctggcattcgacacgctgcccgcgttcgccgccacgaccttgctcgcgtgcggcgccgtggctgcgatgattcccatcggcacgtcgcttcctctcgcgcttgcgcttgcggtgctggtcggcgccgcatcgctgctctgctgcggcctcgatgccgtgcgtctgttcccgggcggcccgcgtttgtgctacgagtacggcgcgcttgcgctggtgggcgtgggattcgcgctttcgctgttcgcgtcggcggccgtcgcggcgatgggtatggcgctctttgccgcggcggttgccctcgtcgtgcgtttcggttcggaatgcgtgcgctgagcgcgtccccgtcctggatgggattccgtatacgacccctaagcgcaggcgagcggcggcgcgctgcgagctcgagttcggccgacgacgaccctccgagccgttcgcgcgcgccgaggtcgtcgagcgcgatcagcggcggggcgcttctcgcccaacgcgccgcgcggccgccgcgaggcgccgggcgcggcacccggcgcctcgcccttcgccgatgtccgacctgcgccctaagtggggcagctgcgagataacgatgccggccaggatggcaacgacgccggcgacctggagcgcttcaaccggctcgcccagcacgagcgtcgacagggcgatgccgcagggaagctcggaggatgccatgatggcagccagccccggtgtcaggtgcggcgtggcgatgccgaacagcgctaccggcacgaacagcgcgcatagtcccagaacgaggccgaacttccagatgccgtcctgcagaacgccgcttgcgaagtagtcggggcacagcgcgaagcccagcgcgcacgcgcctaggcacacgacgagcccgcgctgaacggacggcatgccgcgcccgacgcggctcgagaagaacatgaagaaggtgcagctgacggccgagagcagcccgcatgcgatgccgacggggtcaagagcgcccaccgattcggagaacatgccgctggccatgagcgttccgcccaggataacagccgccgctgccgcctcggccgcacgcgggcgtctgcgcatgaccaccagctggacgacgatgcccatccaggtgaactggaaaagcagcgtgatggctaccgaaacaggcagcagggtgagcgcgtagttgtacagcacggtgccgatgcacgtgttcagtcccagagccaaaagagctatcgtctgtttgagggaaagcgggaccagacgcttgccgcgcgctcgctgcacgagcagcgcgactgcgaacaaaagcgctgcgaacaatgcctggctcgctaccacctgggtccaggtgaagcctgcggcgtacgttatcttcaccgtggtcgcttgggcgccgtagctggctccggccaagaatacgataccggagtatctcaaggtgttcttttccatgaggccattctaacgtacggcgagacctttcaaatgctcgatgcctcgcacgtcgtcgggtacaatgaaacgcggactagaaggaacagggaagacgaaggagagcgaatcatggcatcgtttgcaatcgaaccggcgttttgggagctgttcccccaggcggagatcggcattgtggtggctcggggcatcgacaacgcgcacgagtcgagcgaggacgtgaaggcggcgctggccgaggcgaacaaagcggcgctcgcccacgtgcccgatcccaccatcagcaagaaccccgcagtggcggtgtggcgcgaggcgttccagcagttcaagacgaagaagggcgcgcgctcgtccatcgaggcgcttctgaagcgcgcgagcggcggccgagaagtgggctccatcaatccgctcgtggacatctacaataccgtgtcgctgacgtacgcgctgccgtgcggcggcgaggacatcgacacgttcgccggcgacctgcgcctcacggtgacgcagggcggcgacgcgttccgcgcgctgggcgacgaggccgattccgagacgctgccgggcgaggtgtgctacctcgacgacgccggcgcggtgtgccgttgctggaactggcgcgacggcgtgcgcaccatgctcaccgagagcacgacgaacgcgttcctcatcctggaatccgtcgacccggcgcgccacgacgacctcgcagcggccctcgacgatcttgcggcccgcacccaggcggccctcggcggcgagatggaatcccatatcgtgacgaaggacagcccggctatcgccctgtcgtaagcgcgctcgtcgctcttgcgcggccctgcatctccgtcgcctccccggtgcgactgtagggccgcgcacttatatatcacctgatcaataggcatatcctgttgccgaaactccacggtctgttcgcttgcgcacgtcccttcggtgtgcgaacattcgttctccaaagagatcgagacacggtgcggaaggcggcgaggagctatggcggcgacaggagaggtgcgggttctcgagacgttcggcggccgcgtgatcggctcgcccgaaggcgccggcgagcgccgggtgatcttccattccgacatgaacgcgttctacgcgagcgtcgagcaggccgagcggccggagctgcggggcgtgccgctcgtggtgggcgggcacgaggagctgcgccacggcatcgtgctggcgaagagcgcgcaggcgaaagcggcgggcgtcaagacgggcgaggcgctgtgggaggcgcgcgcgaagtgcccggggctcgtggtggtgccgccgcgctacgaggtgtaccaggcgtactcggccatggcgcggcgcatctactaccagtacaccgacctcgtggagccgttcggcctcgatgaggcgtggctcgacctcaccggctcgctgccgcttctgggcggtgacccggcgcgcacggccgccgagatcagcggccgcatcaaggctgagctgggctgcacggtgtccgtcggcgtgtcgtggaacaagatattcgcgaagttcggcagcgacttccgcaaacccgacgccatcacgttcatcacgccgcagaactaccgatgccgggtgtgggaagctccggtgagcgagcttctgtacgtcggcgccgccacgcgcgccaagctgcactcgtcggggatcgaccgcatcggcgagctggcgtgcgcctcgcccgagctgctgcgccgccgcctgggcaagatcgggcttgtgctgcgcgcgttcgcgcggggcgaggatgcgacgcctgtgaagccctacgaccaggccagaaacgaggtggaccgcacggtgaagagcttcggcaacggcctgaccgcgccgcacgacatcgtgagcgcgtccgacgcgaaggcgctcgtctacctcttgtccgagtccgtggcacagcggttgcgcgaggcgcgcttccgcgcgtccacggtgtccatcggcgtgcgcagcgcgcgcgacctggccagctactcgcgccagaccacgctgcgccgcgccacgaacgtgaccggcatcgtggcgcgcacggcctgggggctgctcgcggccaacgagccgctggacggcgagcaccctttgcgcgggttgcacgtgcgcgcctcgaacctcgagccgtgcgatgcgccgcagcagctggagctggccttcgacgcgcgccggcgcatgttggaggacttggacgagacgatcgacgacctgcgccgccgcttcggcaacacctgcatccagcgcggcgcggagctgctggacgagagcctgctggggctggatatcaagaaggagaacgtcgtgcatcctgtgggctacttctacgactaaaggggggggggcgaggggcgggtcgtcctcctgcgcggaggccgtgccctgcccgtcatcctgggcaagcgaagaggtctgcggcttccgctcaggatgacgacctgcggccccttcgacgcgcgacgggccgaagcgggagcaaaaggggagccctggcagtttttcaagggctcgtcgacatcgagcgggcgactcgttttcgcccgtcaggcgtttctcgggcggcggggaggccgtgcgacggttttcggtcgtgagattgtcagggctctcaatttgcgcccaatcgggccgccgccgacgaagcgtcgggcgaagagcgcggatcggcaggatggagaggggagcgggggcatggtgcagggcatagcggcgcggcggaagcggtatgtggaggtggaagcgacgttcctcgaagatgggcgcatcgtgccgcgcgccgtaatttggcatgacggacggcgcttccccgtgcgcgccgtgctgggcgtgcggcggtgcacgtcgctcaaggtgggcggcgagggcgtgcgctacgacgtgctggtgggccatgcgcatacgttcctgttccacgaggagccccgctggttcgtggaggagatcgtgtacgagccgctcgacccgcttctcgacggcggggcatgcgcctggggtgcggactgagggttcgccggttcagcgggccacttcggcggcgggtgaggcgaaatccggtctcctgcggtaaaaatcgaccggtttggtaatcctggcggggcccgaaccgtcgcttcaacggtcgacgagttccgccttcgcgcgtttgcccaggtcggacgtttcatcagaaaatgaaatcgaaatggtgggattaccagaccgcctcgtttttacctctcgatcgcgattttcgccgcatcgaccttggaggcgggtggcgccgctgcgccctggtcgcgtagaatggaatcgtcagagggctgggaaaggagcgagcatgcatatcgaaacgccgggcgagcgctcgtccgagctggtggccgcactggtggacgtgtgggagcgctcggtgcgcgccacgcacgacttcctcgccgaggacgatatcgtggggctgcgccccgaggcggagtcgggcatcgcgggcgtcgagcggttgacggtggcgtacgacggcggtgcgccgtgcgggttcgcggggtcgcaggacggcaagctggagatgctgttcgtcgcgccggaggcgcgtgggcgcggtgtcgggcgcgcgctgttggcgcatgccgtcgagcatgcgcgcgtgcgcacgctcgacgtgaacgagcagaacccccaggccgtcgggttctacgagcacgaagggttcgtcgtggcgggccgctcgcccgtcgacgacgccggccgtccgttcccgttgctgcgcatgcgcctggtctgcgacgacgaagaaggggagcggtcgtgatggagcctgccgccgagccgctcgcgctcatcgcgggcgggcatacggcgctcgctgcgtgcgctgtgctgtatcttgcctggtggtggcttttcttcaagcccggcgcgccgaagcctcgcggcgggcggtacggcgcgggcgtcgcctgcatcgtgggcgccgccgtgctgggcatcgcgggagcggcgctgctcgtggcgggcatcgcgggcctgctgccctccggatcgcagcccgtcgtcctcggcggcatggccgcctgcggcctcgcgctgtacgccgtgctgctgacgggcacggtgaagctgttcaagcgcccggtgaccacggagcttctgctgttcacggcctgggccgtgctggagctgggcgtgctcgacgcgctgttcgccgcccatgcgctcgccgcgcccgccgccatcgcgctgggagcgcttgcggtggccgtgctgctgaccagcctcgcgtgctacctgctgtactaccgcttaaaaccgcggcgcgcctacgtggccggggccgttccgctggccgcggtgggcctgttcgccgcggcgatggccgtcgtggcggcgttgattcgataaacggtggaggctcgcagacgcggaggcgagctcacgggcgcttcggtatactggtcgtgcgaagaaaggaaccccgcatgaccgagtccgcacgccgatccgccgatacccggccgccccgtccggcccgtcccgacattccgggcgagctgacggaggtggacgacctcgccggctggatcgagcgcgacaacggcggcgacctgcgcgtgtcccatgttctcgtgcgcagggacgcggccgagggggccgacttctccctcgtcgagctgaccgagtcccgcgtggaagggtgctcgttcgtcggctgcgatttcgatcgggccatggcgtccgacgtggcgttctcgaactgcgatttctcaaattccacgttctcccaggcgaacttcacgcgctgcacgttctcttcgtgcaagttcacgggcgccgacctgctggaggcggtgctgtcgcgcgtggaggtgcgcgattccacgttcgcctacgcgtccgtcgcgaaggggaagctggaagacgtgagcgtgagatccaccgacttttccggcgctgacttggccgagctgcgacagcgccgcgtcgaactcgacgacgtgcgcttcgcgggcactagcttcttccgtgcgagcttggacggtgtggatttatcctcgtgtcgattggccgatatcgtgctgtcggatacgatggaggagctgcgcggctgctcgatggacctgttccaggctgccggcatcgcgcgtcgactgggcgtgaacgtcaaagactagcgaatcgcgcggcgccgggcgcccgcgcaacgtgaggagtttcgaagcatggacgaacaggtgcaaccgcgcgggctgagcgcggcagaggtagaggagcgggttgcccgcggcgaggtgaacgtggatgccggcgtgcacacgcgctccgtccgccagatcgtgcgcgagaacacgctcacgctgttcaacgccatcaatgtgatcctggccgtgttcgtgctggtcaccggttcgtacaagaacatgctgttcatggtggtcatcgtgtgcaacacggctatcggcatcgtgcaggagattcgctcgaagcgcaccactgaccgtctgtccatcgtggccagctcgaaagccaccgtgctgcgcgacggcgcgcggacggagctgccgctcgaccagttggtgcgcgacgacgtcatcgaactggggcgtggcgaccagatccccgccgacgccgaggtggtatcgggcacgtgcgacgtgaacgagagcctgctcaccggcgagagcaagctggtgaagaagcgcccgggcgacgagctgatgagcggctcgttcgtgaacgcgggcatcgtcctggcgcgcgtggtgcacgtgggcgctgagaactacgcggcgaagatcagcgccgaggccaagcagcacaaggccgtgaactccgagatcatgaacagcctgaaccgcatcatccggttcgtcagcttcgtcatcttcccgctgggcgcgttgctgttcgcgcgccagcacttcctcggcggcgtcgagaccaacggcgccatcctatccacggtgtcggcgctcgtgggcatgatccccgaggggctcatcctgctcacgtccacggtgctggccgtagccgtggtgcgtttggcgaagtcgaaggtgctcgtgcagcagctgtactgcatcgagacgctggcacgcgtggacacgctgtgcctcgacaagacgggcaccatcaccacaggcaagatggaggtggaggcagtgtgtccggtgaagggcgtcgggcaggacgcggtggacgcggcgttcgcctccatcgcccgtgcggacgatgatccgaacgacacggcgcttgccatcgtcgagcactatgcgcaaagcggcgtgcggtcgctggaacctgtgcgctccgtcccgttctcgtccgacaagaagtggtcgggcgccacgtttgcgaacggggagagctacgtcatgggcgccggtcagttcattctgggcgatgcgttcgtcgaagtggccgagcagcaggaacggctggccgccgacgcgcgcgtgctcttgctggcgcgcgtggagggcttcaccgaggacggcgatctggcggggaggcccgaaccgctgggattcgtggccatccacgaccagatccgcgcgacggccgcgcagaccatcggctacttcaaggagcagggtgtcgacctcaaggtgatctcgggagacgatccgcgcacggtgtcgggcatcgcgtctcaggtgggcgtgccaagggccgaggcgtacgtggacgcgaccacgctggccgacgacgcggccatcgccgaggccatcgagcgctacagcgtgttcggccgcgtgaagcccgagcagaagaaggcgttcgtcgtggccctccaggagaagggtcacatcgtggccatgacgggcgacggcgtgaacgacacgctggcgctcaagcaagccgattgcagcgtggccatggcggccggttcggacgcggcgcgcaacgtggcgcagctcgtgctcgtggacaacgacttcgctgccatgccgaaggtggtggccgaggggcggcgctccatcaacaacctgcagcgatcggcgtcgctgttcctcgtgaagacgctgctgtccatgacgctggccgtgctgttcatcctgctgccgtggcagtatccgttccaacctatccagatgacgctgatcagcgcgttcaccatcgggctgccgtcgttcgtgctggcgctcgagcccaacaaggaccgcatcaaggggcgctttttggagaacgtcatcgtgaagtccatccccggcgccatctgcgcggtgctcaccatcctcatcgtgaacacggtgggctacaacgtgctgcacctcgattacgagcacgtgtccacgctgtgcgtgctgctgacggcctggatcggcgcgcttctgatcgtgcgtctgtccatcccgttcacgcccatccgcgcggcgctgctggtcgtggtggtgggcggcacggtgctcggggccacggtgctgcacggcctgttcggcatcgagccgttcaccttcggcatgaccgtgctgttcaccgtcctcgccattggcgtgacgggcctgttccacgtgctgttcggcatcttcgacgcctggcatgccaagcgcctcgcgaacatggtgtagaaaagcggctgacggcttttcgatcgtcctgcggcatatagtgattgcattacgtaatgcaatatgttagcatgaaggggaacggagcgaaggaaggcggtgaggctatggcggctacggcgactttgaacgtgcgcctgccagaggatctgaaggatcgcggtgcccaggtgctcaggcgcgaaggcgtgtccgtttccgatgcggttcgcggcctgtacgagtacatggagaaggagcagcggctccccgaattcatcaagccggcgaacgaggatgcccgtcgctcggcggtggagcggaaacgatcgactttgcgcgacatggcaggagtcctgtcgccatcgccttgcaccgaagctcgggacgagtggcgcgagcatcttgaatggaagacccgtccaggcgttcgcacatgaaggtgctgttcgacgtcaacgtcatcatcgacgtctggggcaagaccgaggatttcgcttactcgttcgaggcgatggacgtggccatcgtgcgcgaattcgaattgtgcatcacggcgagcatgacccccagcatcgtgtacctcttgtccgcgcggaagctcatgtctcggaaaaaggcgcacgaggttttcgggaacttggccagcttggtcgacattctcgacgtgacggagtccgattgccttcgtgcgcacgaaacactccaaggcgattacgaagacgatctgatcgcctgttcggcgaagcgcaacgacgtcgacgtgatagtcacgcgcaacaaacgcgatttcgcgaaatcgccggtgcccgcgctcacgcccgaggagttcgtgagcgcctacaaacccgtcgacatggaatacgagctggtggagttctgataagctgctagcgcctgcggccgaagccgcttgcgccgttgcggcgcagggagcgcgagaacgccgcgctgcccaccgtcgccttgggcacgaactggcttgcgagcgccttctccgcctccgtcgcgtcgtagccgtcgatgtccagcgtggggatgcgctcgcccagcagcttctcgatatcgagcagctgcgccttcgcctcggggctgacgaacgagatggcgtagccggtctcgccggcgcggcctgtgcggccgatgcggtgcacgtagtcctcggggctctcgggcagatcgtaattcaccacgtactcgatgttcgacacgtcgattccgcgggccagcacgtcggtggcaacgaggacgtcgatggcacctttgctgaagccctcgagcgcccgcttgcgctgcacctgcgtcttatcggaatggatggagtccgcgcggaagcctgcacgcttcagctggccggtgcatatctcggcgcgcgtcttcgtgtcggcgaacacgatgacgcgcttgctgccgcgctgctggagcacgaggcgcagcagcgcgggcttcttcatcgggccgacggggatcatgaactggtcgatggtgtcggcggtctcgcctttgtgggacacctcgacgaacgcgggatccttcaagatggaggacacgctctgcatgaccttgcggtcgagcgtcgccgagaacagcagcgtctggcgcgaagagggcgtggcggccacgaccttcttcatggtgggccagaaacccatgtccagcatgcggtcggcctcgtccagcacgagcacctccacgtcgcgcagcttgacgacgccgcgttccatgaggtcgtacagcctgccgggcgtggccacgaggacgtcgatgccgcggtcgagcttcgcgatctgccccttgtacttcgtgccgcccatcacggtgagcatgcggcggttcgacgctttcgccagctgcgtgcaagcggcgtcgatttgctgggtcagctcgcgcgtggggctcacgacgagcgcccgcggcgatcccgggcgcttggcgcggccgatgcgctcgaacaggggcagcgcgaacgcggccgtcttgccggtgccggtggtcgcggcggccacgacatcgcgaccttcgaggaccaacgggatcgcttgctcctgcacgggggtgggggcggtgaaacccatccgctcgacggcggacagggtcgtctcggacaggccgaggtcttgaaacgtcgaactcaaagcgtatctccaagcatcattgcgggattcgcgcgacgcgccggcggctctcatcgcgtgcggcgcggatgtgggtgcgcgccgatcacctgcgtctatgatagcctatcatgcgcgtttgcgggaggttccgcgcgaataccccgcaacctgaggcgttgccgacgcgacgggctgagcaggggagtgcgcctgggcttgctagttttcgaggggatgcgggcttttctcgctcatgcacgcttttgtcaaccatttcttggcatttgaggccattttggttgacaaaagcgtgcatgagcagaccttcgccgtgttgttcgcaggcatcgagcgggatggatcaccgtgcaacaggaagccttttcgcagcgtttgacggggagaaggggccctggctacctcgactcgcggacagccgcggcagtgatggcggcctcggcggcgatttcgacgctgcgacgcgcggtcatgcgcacgagcgccagcgccaacgcggcggcggtcagggcgaacagcgcgcctgcggggccggtggccagaagcccgcccgcgttcatcacgaggccgcccgcgaacgagcccagcgcgatgcccgtgttgaacgacatgggatgcagcgacgccgagaacgtgagcgcgctggggtagtcggtgcgcgcgacgctctggaacagcatctgcacggtggagttcatcacgtacatgagcaatcccaccgcgaggatgttcgcgataccgacagcgcctgcgggcagactcacggccagcagggccagaagcgccgcgtgggcggcgaaggcgacgggcagcgcgcgcagcccgaagcgtccggcaatccagcccgacagcaggttcgatcccacgcatgccgcgccgaacagcaacagcacgaagctcgatcctgcggcgtcgaggccggcgatgtcggcaaggataggggcgaggtaggtgtagaacacgtaggtggacgctgcgccggcgagaatcatggcgatgttcgtcagcacgcggctgtcggcgagcaggcgcagctgcgagcggagagtgggggcggcgtctcccgtatgcgcgggagtgcggggcagcgtcggcagcaggacgacgctcgccgcgaggccgagcgcgaacacgcaggcgtaggcggccttccagtcgaacaggccggccagcgccgtgccgatgggcacgccgacgacgctcgacaccgagaaaccggcaagcacgagccccagcaccgcggcaacgcgcttgggctcgacgatgtcgggcacgtaggtgagcgcgagggccagaagcgtgccggacgtgacggcgggcagcacgcgcgagacgagcagcagcgcgtagccgtcggcgaacagggtgagcaggttgccggcgttgaacaccaccagcagcgccgccatcaccttgaaacgggcggcgcgcgccgtggcgagcgctatgacgggcgtggcgacggcgcaggccagcgcgtagtagcccacgagatcgccgatgagcgtgagcggctcgcccagcccttcggctacgtcgggcacgatgcctatcagcacgaactcggcgaacccgagtgcgaacgcgagggtcgtcagcaacgcggttgcgaacgcgttgcgcttgcggctcgtgcggttttcggtgtccatggcgacctccaacaggggtagtgcgaacagtgcgtgtttccgtcccttaccgtaccgccggcctcgccgaatagccaatgcttataatgaaagcttccccatgcctgaaaagcatggagatgctgaggccgctgtggaacctttgacatgcaggtgctttctggtcctgacgcaaggggccgatatgaaaaaggttcgtcaagcgttaatcggcctcgggccgcttttcttgccccttgtcctcccatatcattatatgagtaatatagtcatggacaaaaacatgcccgaatctgcacttttaatgagtcgtgtagatgcggatgcgctctctaccaggcgtttttgtaactaagactttttgaagcccgcaaaactctgcaagaattaccgaataccagccctttttgtccatgatggttttaatcatatgtaaatgccgtgacggtctgggggtgtgcgagaggcgtcaaagggacggggatatagcatgtggggaggggccgcatgcgtcgtatccactgccttccctgacgcgttgaaaggagcgccgggaaggggcgctcctttcgcgttgggaggagggtgtgaggaaaagaggaggctattccttgcgcagccattcgtcgccgccgtccgagcattcgccgcccggccggtagctggcgatcttggcgtcgagacgcttcgcggtggcctgcatctcctcgagcttcgcgaccagtttcgcgcgctgctcttccagaatctcaaggcgggcggcggcggtgtgctcgccttcctggaacagcgccacgtactccacgagcgcctcgatctgcacgcccgattcgcgcatgcagcggatgaactccacccagccgcagtcgtattcggtgaagtcgcggatgccgttgggcagccgggtgacgtgggggacgagcccgatgcgctcgtagtagcgaatggtgtcgaccgagattccgtagcgtttcgcgacttcggcgatttgcatagcgcgcctcctagcaggtcgtggggaagtccgttcatcccgctatcaacataccgcgctgctcaaccgatagccaatgcttatatcgaaaggttcaccatgcttgggaggcatgaagaacctcaagcagcccttgagttggccggcggccgtgcgccgtctaaaccccgcatcccatgaggcgtgcgcggttgacttcgtgcaggcgcttctcgatggcgcccggcgcatcgactcccgtggcggtcaccacgcccacgaggcgtgcctgctcgaagcagtcgacccagccttgcagtcccttcgtcgccccgtcgaacgcatgggcgtcctcgtcggccgccgtggccaacaggtacacgtcgcgaaacgcaggatcggcggcataggccgggttgctgcggtcgagcagggtcttcatctgaccggccatctcgaagaagtagatgggcgtggcgaacgcgatggcgtcggccgcgacgatgcgctccacgatggcggccgcatcgtctttcagcgggcatgcggcgccggcttggcaagccaaacacccgcggcaaaactcgatgcgcttgccgcgcaggctgaccgtttccacgtcgtggcccgcctcgcgcgccccttcggcgaacgcgagcgcgagggcgtgcgagttgctggtcgggcgcaggctggccgataccaccaggacgttctttcccatggggtttcctctcgtcgtatgcgatgcgtcgatcgtcttgtcgcgttccagtgtgccccttggagcaggctccaagtcaaatggaggtttcatggcgacgcgaggagggggtgggagagaagaagctttcgccgcgtcctcgcaggccgctgccgggcttcgggaaacgccgaaacagttgcgtacggtctacgagatgcctgcgtcgtcttccgcatgcctcgcgcatacacgttccatggcgtcgaggaaggcctgcgtctgcttgttgggcatggaggaccgccagacgaggccctggtgagcctcgaagcgcggggcgaagggaacgaagcgaaggtcgctgctctcgctcgcgtcgaacaggccctcgtaggtgagcatgcagctcatgccctggcgcacgaggtagcggccgttcagaggcaggttgaacgtggcgaccacgtccatccgatccagcgcgtcgcccgcccagtcgcgcagtgttccagcgagagcctggcgcgaggcgatgacgctctgtcctaccaggtcggcaggcgagatgccctcgagtcgccccaccgcgctgtcgcgcaaggccaccgcgccccatacatccgtcactggcaggtgcatcgtgttcatcttggcgtgctcgcgcatctcgcactccagcatcacgtcgtagaacccgcgcaccagcccgtccttcagctcggcggtggtgccgctgtggatggcgaaatcgacggcggggtaggtgcgccgcacctcgtccatggcctgcgcgatgagcgtcatcgcctgggattcgcccgctccgatgtggacggtgccgccgatcgatcgctcggagggcagcatgtcctcctcggccttgtgcgccagctccacgatggactccgcgtagcggcagaggatggagccctggtcggtcagttcgatgcccttggggccgcgcgtgtacagctcgcgcccgaactccttctcgagcgacgacagctggcgcgagagcgtcggctgggtgatgtgcagggctttcgccgcgttcgagatgttgccttcgcgcgcgacggccaggaagtactccagggtcctcagttccacgacgtcctcctttcgctcgtttccaagctatgcaaaaccggtatgaagaacaattcattataggcatttttcatagcgtcccaccggttttagtatcggcagcagagagaagccgtgcaactcaaggagaaaggggagcatatgtccctgctcgacaaaagcctgaagcgacgtgatttcctgaaggggacggcggcggccgctgcggcgacggcggcgttcgggctgtccggctgctcgacgggctctgcgcaggccgccgggtccgacggcgcgcacgtcgtggcatccgacgccagcatcctggccgacgcgggcgagtggatgcccatccactgccaccagaactgcaatcagatgtgcctgaacatgggctatgtggtggacggcgtggtcgtccgccagaagaccgacgacgcgcgcgaggacagcttcgactgcccgcagcagcgcggctgcctgcgcgggcggtccctgcgccagcaggtgtacaacgccgaccgcatcaagtaccccatgaagcgcaagagctggcagccgggcggcgccgagaacgcccacggcgagctgcgcggcaaggacgagtgggagcgcatcagctgggaagaggcgctcgactacatcgcggacgagctgaagcgcgtctacgccgaatacggccaggacgccgtcatctgcaacggctggcgctgggcgcccggctcggccatgttccccgtcatcggcggcgcggtatacgacaccgagaccgagtcgttcggctgctgggcattccagaccgaggcgctgggcctgtactcctggggcgaccaccccgatatcatgatgggccccgacaagtacgacctgccgaacgccgacaccatcgtgttgtacggctgcaatcccgcctgggctcagcactccagcatgtactggctgaacaacgcaaaggagtccggcaccgggttcgtgtacgtgggccccagctacaacgtgaccgccgcgcagctgggcgcgcgctggatccgcgtgcggccgggcaccgacacggcgttcttgctggccgtgatctacgagatgatccgtctggacggggagcgcggcgacatcatcgattgggacttcgtgaacgagcgcacggtgggcttcacgcccgagaccatgcccgaggatgcgacgaccgacgagaactaccgcgactacatcctgggcgcctacgacggcacgccgaaaaccccggagtgggcgagcgagatctgcggcacgccggtcgaggacatcacgtggtacgcggagctcgccgccaaggacaacaaggtgatcttcttccacagctacgcggcctcccgctacctgggcgccgagaacctgccgcaggcgttcatgaccgtgtcggcgctgggcggccattacggcaagtcgggccacggctcggccgccatctacacgtgggacgccggcgactcgggctaccgcctcatccagcacgcgggcggcgagtacgcctacatcgacaacttggtaggctcgccgggcgctaccggtccgaaccgctgcatcgaaggcaactcgtggtggagctcgctggccgaggggaagtacttgtccacgtccgagggcccctacgacctggggtcgggcgacgatccgaccaagctgcgcgcgaacacgcccacctaccatgcggcgcgcgagatgccggtgaacccgcgcctcatgttcgccacgtgcagcaacttcatgcagacgcgcggcaacctgcccaccgccatcgaggtgatgcgcgccgccgacacctgcatctcgctggagatcaagtactcactgaccgcctcgttcgccgacatcatcctgccggtggccacccactgggagggcaacgacgacgagagctggggcgagctctgctggccgagccccttcggcgacggcaacgggcagaagcagcgcaaggacgcgcttctggcttggcgcccgttggtgaagccgatgtacgaggcgcgcgaggagaagcgcatctgccgcgacatcgtcgagcgcatgggcttcgacgcggacgacgcctatcccaagagcaactacgaccagtggctgggctacttcctggggatgcgcgagctgtccgaagacctctcccgttgggagccggtgatcacctggacggccgatgacaaccggaagcaccatgcgaactacccggaacagcagggcaagatctcgttcgaccagttcatggccgacggctcgtacgtggtgcgccgttcgcccgacgacaggcgcaactacatcggctaccgcgacgacaagctgcgcatcggtgagaacggcgaggtagtcgtggccgacaccgcgtggccgcgcccgtcgcgctcgggcaagctggagatatactgccagttcaaagccgacaacgtgaaccgcacgggactcaatcccgagcccatcaagccctacgcgaactacttcgtgcccaatcgcggctaccaggacacgttcgccgactgggacgccaaggtgaagggcgcctatcctctgcaggcgtacacgccgcattacatgcgccgcgcgcacacctgctacgacaacatgacgtggacgcaggaggcgttcaggaacccggtgttcatgaacgcgcaggatgctgaggagcgcggcatcgaggcgggcgacacggtggtgtgctacaacgacttcggccgcatgctgcgcatcgcccagccgctgcaggggatgatgccgggcaccgtcggcatcccgcacggcgtgcgctcgctgttcgacgagagcgaccccgcgggcatcgtcgatcgcggcggatccgagcagatgctgtccgacgggcagcagtcgaactacttcccccaggtggacgggtacaacagcctgctcatcgagatcgagaagtacgacggcgaggcgctggtggaagactgcgaccgcggcccgttcctggctgccggcatcgacgccgagggaacgcccgcctacgtcgccgaaggcatgtacgaaggcaaggaggcttaaaccatgagcttgggattctacgttgacgtgcagcgctgcatcggctgccgaacctgccaggtggcgtgcaaggaccgccacaacctgcaagcggcgggccctcgcacccggcgcgtgggaagcttcgaatgcgggatgtacccggaggtgggcatgttccatctgacggtgtcgtgcaaccactgcgacgatccggcctgcgtggcggggtgtcccaccggcgccatgttcaagtccgacgacggcacggtgcagcatgtcgacgactgctgcgtcgtgtgccgcaattgcatgatcacgtgcccctacggcgcgccgcagttcgacgaggacgagaacatgatcgtgaaatgcgacgcctgcaaggcgctgcgcgaggacggccgcaacccggtgtgcgtggacgcgtgccccatgcgcgccatcgagttcggcgacgtggacgagctgcgcgcgaagcacggcgacgccgtgagcgagctgccggtgctgccgtcggcggcgaccacgcagccgaacctgctgctgcacgcgtcgcccgaggcgcagcgcagcgacttcaacgaggtcgtgctgtgagcgcgccgaccgacccggcgggcgagtccgtcgcgctcgaggccctgctgctcgctcgcgcgcgcctgtacgcgctgttccacaagctgttcggcgcggctccggatgcggcggtgctcgaggccctgctaggcggggcgacggccgacgcggtggacgagtacgcggaggacgacgagaccatgcacggcttcgggcgcttcctgtccgaggtggccgctgcggaggggcgcgccgcgctcttggaggcggcgcgcgacgagcacgtgcgcgtgctggtgggccccggcgcgttgccggcgattccatgggaggcgccgtaccgcacgggcgagccgaccgtgttccaggaggacactctggccgtgcgcgccgcgtatcgggcgcgcggcgtgcagccgaggaagatgcagcgcgtacccgacgaccacgtgtcgctggaatgtgcgttcatggcgcgcgaggcgcgtttctcgctcgcgcagctgatcgcgggcgacgtgtgcgcgctggcggccgggttgcgcgcgcagcagtccttcgtcgtcgagcatatgacagcgtggctgggagagtacgcgaagggtctgcgccgctctgcgacggcggtgctctacccgcaagcggccgaggcgctggttgcgttcgttgccctcgatgcgacgttcttggccgaagcggcgttgtgggccgaggaggtttcggcgtcgggcgaaaggttcgaagcgctgggtgcggtcgtcggatcgcccgaggggctggccttcgccgccgccgaggaagccctggcggcgctcgaggagacgcgccccttcggcatcgaggactacgagctggcggcgtgcgagggttgaggccctgtcaggaagagtcggcgcggcgggtcgtccgccgcgcccggatccaagtgaggacggatgatgacgatgatctctgagtttcccttgttcttgttcacgacgctgggcgggctggcggccggtgcgtacgtggcggcggcgatcttcccggacgttgatcgtaagccgaagcggccgtggctgttcccgctcgcgtgcctcgcgctcttgggcgtcgggctgctgggcgtgctcgggcacctcgggcgacccgagcgcttcctgctggcgatgagcaacccgtcgtcgatgatcgccgaagaggcgtactggtccatcgcgttcggggtgctgatgctggtcgatttcgttctgctgctgcgccggggcaccagcccgggcgcggtgcgcgtcgtggccgccgtggcagcggtcggcctcatgtgcatcatgggatgggcgtacttcacgagctacggcaaccccgcctgggcgacgtggcagacgctgccgctgttcgtactgggcgatctggcgatgggcgccgcgctgtgggggttgatgcgcgagggttcgtatcgctcgggcgcgttcgccgcggcctttgccatgctcggcgcgctggccgtggcatcgatcgcgctggcggccgcgcacttcgcaggtctcggccataacgcgctgccgttcgcggccgccgtcgtgctggcggtggcgggcgtggccttcggcctgctggcatggaagggcaagctgtccggcgcagcccccgcgctcgctttcgcctgcctgttcgctggcgtggccgcagcccgctacgctttctatgccgcgagcattttgtaacggatcgaacgtcctcgaaggggcagccccctttgaggacgcgtcagccttttcgtcggaagaaaagctagaaaaggcccgaaaccctcataccggctgatgttttcgtcagcttgcgaagcgtatgcttccctgtatgaatgccctcggaagagcagccgagggctgcgcagagccgcgggagcggacgggttcgggaatcttcgaaggcgcgttcgtgcgccaaaagggggtgccccctttatgttgcctgcttattgcaggcaacataacccgctctcgaggcacgatgatggcgagagggagacggcatggagaaggcgtccatcggcagaaggcttgcgacggcggcgttgtgcacttgcttggtcgcgatggggatcccggcggcggcgctggcgcagggcgacccctcgacgggcgcggacgcgcctgcgacgaacgaccctgcagagggcgtttccgcgacggaagcgggcgcgcttgcagccgacgggctcgcggcgggccagggggaggcttctcgatccgatcccgtcctccttgcatcgttcgaggatccggatccggcgtcttacgacgtcgcggcgggcgaggacctgccgaaccttcccggctcgctgctcgcgcgggacgatgccggcgggcaggtcgccgtggagggcgtctcgtgggagtgcgccgacgccgacccggtcgcacccggaacccatgtgttcgcggctgtgctgccggcgggctacgaggtcgcgcccagcgcgcggttgccccaggtgaccgtgaacgtggccgcgccgcaggcgcccgcgcccgagcttgtggccgccgcgccgcggggggcctcttccggtgcgctcgggaacggggcgtcgggggtgctccatgtcaccttcgacgacggcggtaaaatgtcggacgccatcgacgaggcgctcgagggcgagaacaagggcgacgtgatggacatcgtgatggccggcaacgcgacggagataaccggcgacgactggatggcgctcaagtactgcttcaagaccggaagcgactggtccagcctgtccggtttggacctgtccgggatgggcaggctgaaggaggttcggggactcgacggtggcaacgatgcgttcgacaggctcaccaccctgaagctcccggacagcctcgagaccgtcggcgcctatacgttcttcaactgcgagaacctggccctatcggagattcccgcgaaggtgtcctccatcggcgagcgcgcgttctccggttgcaagaacctcgagagggtgtccttcccctccggcctgaagtccgtcggcaagagcgccttcgagggctgctccaacctcaaggagctcttgtttgggagcgacgctccgccgaagctgggcgcggacgccttcaaggacgtcgccgtcggcggcacggtgtactgcccggacgcggatgcgtacgagacgaagttcggcgccgacgggccgagcggttggacgtacgcgtccctctacgagctccaagtcgaattcaacaacggcaccgccatgcaggacgccatcgacaaagcgctcgagggcaaggacaggggcggcgcgaaggacatcgtggtgaccggcgacgcgacggcgatagccggcaacgactggacggcgctcaaggactgctacaaggatggcagcgcttggaccagcctgtccggtttggatctgctcaagatggacgagctgggcacggtgtcgggggtcgacgggggtggcgccgcgttcggcaggctcgctcacgtgtggctcccggataccatgggttccatcggcgactacgcgttctccggctgcaccagcttgcgcctcgaatacctgcccgagggcgtcacgtccgtcggtgccggcgcgttccaaggttgcactagcctggccctcggttcgctggtcgagggcgtcagatatgtcggcgaatccgcgttcgagggctgcaccagcctggtcttgggcaggctccccgacagcatcgagttcatcaaaaagtccgcgttctccggctgcgagaaactggacttctcggagattcccgcgaacgtgctcgccatcgaacctaaagcgttctccggctgcaagaacctcgagagggtgtccttcccctccggcctgaagttcgtcggcgagagcgcgttcgagggctgctccaacctcaaggagctctccttccgcagcgagaacccgccgaagctcgacgcggacgccttcgagggcgtcgcccagctcggcgcggtgtactgcccggacgcgacggcgtacgagacggcgttcaaggacaacgggccgagcgggtggaggtacgagcccttctacacgctcgaggtcgtcttcaacggcggcgacggcagcggcaccgccatgcaggccgccatcgacgccgcgctggccgacgtcggcaagggcaagatcggcgcgaaggacatcgtggtgaccggcgccgcgacggagataaccaaaaacgactggggcaatctcaagcgctgctaccaacgcgacagcgagtgggccaacctgtcgggcctggacctgtccggcatgggcgagctgacggcggtgggcgtcgataatccgtccatccaagatccctattacaacaggcttgtcgacttgaaactcccgagcggcctcgagaccatcgacgaatacgcgttcctaaactgcgataaactcgtcctcgacgagcttccgagcagcctcgaggccgtcggcaaaaacgcgttcgacggatgctcgaacctggccctcgacgagcttccgagcggccttacctccatcggggcctatgcgttcaatgactgcgggaacctggccctcgaggaacttcccgccggagtcgaggacgttcccgactgcgcgttccagggctgcattagcctggcgctcgcaaagctccccgcgaacctttcctccatcgggcaaggggcgttcaacggctgcaaaaagctggctatctcggcgctccctgcgaaggtgtcctccgtcgggtcctctgcgttctccaaatgcgagggtctcaaggcgatggccctcccgtccgccttgcagtccatctacaagtacgccttcgagggctgcaccagcctcgcggagctctcgttctacggcgagaacccgccgacgttcggcgcgagcgccttcgaggacgtcgccgtcggcggcacggtgttctgctcgaacgaagccgcctacaggaccgcgctgcagggaaccaagctgccggccgactgggcgttcgacgatctgcccgcctgcacgctggaggtttccttcgccgacggcggcgacatgcggaaagccatcgacgacgccctggccgcctccgggaaggagcgctaccaggtgacggacatcagggtgatcggcgacgcgaaagcgatagccggcggcaactgggatgcgctcaaggaatgctacaaggacggcggtgcatggcccatcctgtcgagcctcgatctgtccggcatgggcggcttgaaggaggtgttggggaccgaccccggctccgatacgttcggcgagctcgtcagcctggctctcccggacggcctcgcgaccgtcggcccctccgcgttccagggctgcaccagcctgaccctcggcaagctgccggacggcgtcaccgccatcggccaccacgcgttctccggctgcgtcggcctggcgctcacggcgcttcccgagaagctcggtgccatcgagtccggcgcgttccagggctgctccaacctggcactcgacaggctgccggacggcatcatctccgtcggcgagcgcgcgttctccgactgcgtcggcctcaaggagatgtcgttcccctccgacctgaagtccgtcggcgcgagcgcgttccaaggctgctccaacctggcggcgctcgagttccgcggttctgcgccctcgctcggcgcgtccgtcttcctcggcgtccccgccttcggcgagctctatttcccgcagggcgagaactacgtccagggcgacttcggcggcgacgatctgaaaggctggggcttctacggcatggcccgacgcacgctggtcgatgcggtcacgggcgcgaaggtgtccggcgtgctgtcgtccaacgcggggctgctcgcgcagaagggcggcctgcaccaggcaggagcctgcaaggcctgcgatgcgatgcgcaagcgcgaggccgagggcgtgacgctcgcggagctatgcctgtcgctgtccggcgggcgcctctggggcggcgtcgacgtctcgatcccggtaggagccgacaacgacgggcggggggtcgccgtgctgcactgcgccggcgacgtgctggaggaagcggccgccacggtggccggcggctatgcgacgggcgctttttcgggcctttcgcccttcgccgtggtcgcgtccaagcccggcccgaccccggtgccgggacccgatccggatccggtgccgaagcccgacccggttccggagcccgacccgaccccggttccgaagccggtcccgacctcgggatcgggctcgtccgccatcgccgcgaccggcgacggtccgggggcggccccgtggatcgcgctggcgacggtcgcggccctcgtcgccgcaggggcggcggcaagccgaaagcgcgcgcggcgataggcgccgcgccggcggtgtctaaacgaggacgggcactttaggcattcttccgaaatgatccacgatcgggaatattcggtgctctaatgcttgattattcccgatcggtaatgatatcatttcagtcttaacatcgttaccgatcgggaatgtggtgccaatgacgcgcgtgtcgaaaacggaagacttggggaaggcccttcgcgctcggcgcagagagctggggtactcccaaagcgagctcgcaggtttttgcggctgcggcacgcgcttcatttcggacttggagaacggcaaggagagcatccaactcggaaaggccctcgacgtggcgtccatgatggggctcaacgtgtacgtcgagcgcaggggcgatgccagcgactagaacaggcgttttcgccgcatgcgctccttatgcgttcaggatgcgcgcggcgccgtcttctacgtagatggcctgcttgtcgtcgaaggggcgaacgtcgaggatgccggcgtattcccgaacgatctgctcggcggcggggtcgagctcgcggttgcgctcatggggcaccgggtagaagtcgacgaggctgagcccggcgaaatcgtgcaggtcgggtgcccggtcgggccgatccatcgcgcgcgagtacgcgatgtcgggagcggctacgatggctcccgccgattcgccgatgcagagcttgcctgcgcgcaccgcttcgcagagcagcttgtccgccccagatttccgcagttcctgcagcaggtagaaggtgttgccgcccacgatgaaaacgaggtcgttgccctcgaacgcgcggcgcatggcctcgtagggcgccgtggaaacgtcgacggcgtccacgcgcagccccatgccgcgtagcacccatcggctcatgcgggcgaggaacccgaggcgttcgacccggctggccgtggggatgtacgtgacggttttgccttcgaggtcgggctcgatttccttcaagaggcccgtgacgttctggaacatcgacacgagaagcagcctttccatgcgagccgtcctttccccttgacttgaagcgcgctccaaccggtatggtaccagagaaacgacggcgaaaggagctgcgatggaagaggcccgcatggatcggcgcaccttcgtcatgggggcggccgccatcggcgcggcggcgctagcgggcggggtgctgggcggatgctcggatggggaagaggctgggacgatgacggaacctgttcccgctgcaccttcgccgacgcccgaacccgcccccgggccgctgccgtacgattccgtcttcccgccgcacgagcctttgggccgcggcgtgggagccatgccggggcgcgtcgcctgggtgcgcgacgcggcggccgtgacttgggacggatcgggctactggtggcagcgcgagcatttcaacgaggacgcggttcggcgcatggtggacgacggcgttgccgcggcggcgggcgcggacgatgcggcggccggatggcgcgtgctgttcgaggcgcacaacacgcgcgtcgggcgcgcgggcggctatcgggcgggtcagcggatcgccgtcaaggcgaacatgaacggcgcgggcacgttcggcacggacgaggacagcgccatgagctatacgacgccggttcttttgcgtgcgctgctgctgtcgctcgtggaggacgcgggcacagcgccgggcgacatcgcggtgtacgatgcgtgccgcatcttcccggcgcatatgatggagttctgctcggagggcgcgcttgccggcgtgcgtttccgctgttacgacgagggcggcccgaacgacgccgtgggcgacgaaagcgcgcccgtcatctggtcgggcgacgtggcgggagcggcgaacgtggtgcccgcctgcgtatcggaggccgactacctgatcaacctcgcaagcctcaaggggcatagctacggactcacgctgtgcggcaagaaccacttcggatcgctggtcaactccaaccgcctgcgcccgcccgaggccgccggcatccaccgctacgtgtcgggtcagactatgggcatgtacaccgtgcccgtcgatttgctcgccaaccgcctgctgggcggcaagaccatgctgtggatgctggacggcctggtgacggccgtctccgaaggagcgtcggtcacgcgcgaggcggcgctgtgggagggcgcgcccttcgacggcgggttcgcggccagcatcttcctgtcgcaggatccggtggccatcgactcggtgggcgccgatttcctcatcaaccagccggcggtcaccagccgcaacgccgcgctcgagggcaacctggacgtggagaactacctgcatgaagccgcgttggcatctgcgccgccatcgggagccgcgtaccgcgacggcgcagggaacccggtggagagtctcggcgtgcacgagcactggaacaattccgtggagcgcctgtacagccgcgaccgcggtgagtcggagggcatcgagctcgtccgcatcctgcgttgaggtcgctgcacgcgatctccatttgacttggagccgactccaagtcgtagactcgaaggacggaaacgagaggagaatcagcatgaggcaaaacggattggacaggcgcaccttcgtgatggggtcgttcggcttctgcatggcggtgctcggcggcggcatgctcgccggatgcgtcgcggcggaggagcaggttgcggaaaacgatgcgcgcgaacagggcgaaagcggatcggccgagtccgtggcgcccgaatcggcgcctgagcccgcaggtcgcgtcgggcgggcgctcgtggcggtgttctcgtactcgggcaccacgctctcggtcgccgagcgtatcgcggaggcgacgggcgccgacctgttccgcatcgagacgaccgacgcgtatcccgacgactacgacgctatgatctctcaagtgcagcgcgagcaggacgagggctatctgccgccgatcgcggcgacggtgccggattgggacgcctacgatgcggtctacctgggccatcccatctggtggggacaactgccgcacgtgatgcgggcgttcctgtcgcagcacgacttggcgggcaaggttatcgtgccgttctccacgagcagctcgagcggcaacgccgaagccctcgacgccatccgcgaactctgccctgcggccgacctgcgcgaagctctccacctcacgcgcggcagtctccccgtcgccctcgatgaggtgcagccgtggatcgagcggttggggctgtagccgtcatgccaaagcgggctcgataggcgcacgctcctggcggggtcggcattcaaaggcgcgctcgtcccaattccgctatgaacgcattctagccggccgctcccgtttcgtcgcgcttgaagacgccggtggattcaagcacggcggcgaacaccagggcgacttcttcgcgcatgacggggcagagcgcgccgcccccgacatcgccgcctgcgagacagggggagggggttgtcgtctcatggtcgaactccccggcgcggcgggcgtagacgtcggcggcccaaggggcgtggggcgcggtggcctcgcgggcgagcaggcgcgcctccacctcctgcggcgtgcgtccttctcgtgcggcgcacgcgagctcgtcctgcacggccggcagctcgcgggcgaggcggggcggcaggacggcaagccccatgatctcgatgaggccgatgttctccttcttgatatggtgcagctcttcgccgggatggaagatgccccagggatgcgcggcgtccgtgcggttgttgcgcagcacgaggtccagcacgtactcgccgttctcccggtgcacgatggggttgagcgtgttgtggcgcacgggcgcgccgtcggcgtctcggccgcacgcgcgaacgccgcacggctcgaaggagaagccctgccacgcgtccagcacccgcttggcgccgcgcgcgagcgcattccgatcgtgagagatcaaacggagcaccgatgcgggccagcgcacgacgccgccgtgcacctgaggacatcccggaagcgccacagcgcgctcgataggcgcgcgcatcagcggaaacacgtgccgccctccctggaagtggtcgtgggagagtatggagccgcccacgatgggcagatcggcgttcgagccgacgaagtagaacgggaacgcgtcgacgaagtcgagcagccgctcgaagcaggcggcgtcgatcttcatgggccgatgctccgcggaaagcgcgatgcaatgctcgggaaagtacgcgtacggcgagaactgcagcccccaccgctcgccgcccagctcgatggcggcgatgcgcaggccgggcttggcagggtgctcgggcgtgccggggaattcctcgttctcccagcagaggtcgcactgcggcccgcgcgaacggccggcggccggatgccgtccctcgcttgccgcagccttcgcgtgcgccggcggtgcgccagccgccgcgttcgcgcgcatgcttgcgggatcgtccatgcgctccggcgagggcgtgcctttcgaggctgccgccgtgatggcgcgcggatccttctcgggtttggccaggttgatggtgcattccaacgtgccgtaggcgctctcgcccgtccaacggatggcacgcgccgcgtctgccttgaggtagccgctggccgtgcccagcgcgtgcaggtaggcgacggccgcttccccgtcgcgcgcgtgcaggcgggagaaggcggcgcgcacttcgtcgggcggcggaagcggtgcgcccatcaggccatccgctccgcgtacgcgccgcggccgtctaccttcgcgcgcaggcaggcgtcgtagcccagcagcgcatccatcgactcgcagaacgcgtcgatgtcctccgccggcacgaaggccagcgcgctgccgccgaacccgccgccgtggatgcggtacgcgccgcgcccgtccaggaggtgcgcgcacagcgcgaggaccatcatggccggctgccgtgcgcccaagccgtcgccgcgcggcgacacgttctgcaggaactgcgccgacgacgcgcccgattgccgcacgccttcgagaaacccttcgatgtctccggattccaacgcccgctgctgcgcggcaacgcgccgcgtctcctcgaagtagtggagcgcgcgcaaggccgcacggtcgcccaggtgcgcgcgcacgtcggccagccgggcgaggaagacagggtagggaacgtcttccagccgctcgcatccgaagcgccgcgcgaccgcgcgcatgtcggcgggaacggccgcgtactcgtccgcgtggacggagtggtcgcatcggctgtccaccaggcagagcgcatagccgcacgcctcccagtcgaaggcgatgggctcgacgcgcggcaggtcgcccgcgaagtcgaaggccgccgcgccgccctgcgcgctggccagctggtcctgcacgccgcagggcttcccgaagtaggcctgctcgacctgagcgccctccaacgccagcgccacggggtcgcacggcacggcgcccgtcgggtcgcacagcacgcgcagcagcacgccgaccagcatctcgaacgcggccgacgacgagaccccggcgcctgcggggatgtcggagcaggtggccgcatcgaacccggaaagccttccgcccgcgcgcacgaaggcggccgccatgccgcgcacgagcgcaagcgacgtcccgcgctcgctttcgcgcgcgtccaagtcgccgcagctcagcgcgatgtcgccgaagctctccatgctcacgcgcatctcgtcggtgccgttcggggcggcgagcgcgtagatgcggcggtcgatggcggccgagatcgtgcgcccgccctgatggtcggtatggttgccggccagctccacgcgcccgggagcggatgcgaatgcgagcggccgtgcgcccgcgttcccgaagcgctcggcgaaccgcttgcgcaggcgcgccggcgcaggagtgcgggcatcctccagggtcgtcatcgcgcatcctcctccgccggatcggccagcttgttgacgcgccggtcgtaggtgagcagcccgttcgtctcctcttccacgtcggacagctgcgtgtacacgtaacccgcaagcccttccgcctccagcgcgtccgcctgcgcgagcgtcttgtgcacggcatcccgaaacgatgccgggtcggggcaggcggcgtatccgtacgatgtggccagcgagctgtggtcggccagatggcacgacgatccgccgaactccgatatgacgaacgctcgcgccgggcgcgcctcgtcccggtacacctcgagcggccggaagtagttatgcacgctcaggaagtccccgcaggcctggtcgtaccagccgctgaccgcgtcgacgggccgcgaggggtcgatcgcgcgcacccgctccacggccctgcgcgcgtcgaactgcccccaggcctcgttgaacagcacccaggtcacgatggacggatggttccccaggtagcgcacggtgtcctcgcatgcttcggtccactcggcgcgaaacgccgcgctgtcggaggcgagcccggggaagtggcgcgggtcgtcgtcggcgtagcggccccacgagccgcggaagaaggtgggcttgtagctggaatgccaggggctgggcgccgcgccgccgctcaccatgtcctgccacacgagcatgcccagcctgtcgcagtggtagtaccagcgatcgctctccaccttgatgtgcttgcgcagcaggttgaacccgaggtccttcatcgaccggacgtcgaaggccagcgcctcgtccgacggcgcggtcatgaggccgtcgggccaatacccctggtccagcacgccgcgcaggaagaggggttcgtgattgaggaacagccgcctcgcgccgtgctcgtccgcttccacgctcaccgtgcgaaacgcgcaatagctggtcacgcggtcgcttccgtacatcagctccagatcgtacagatgtgggtcgtcggtgctccaccggtgcggacgcgccacgtcgaggatcggctcgcacgtcccgtcggctgcgggcgccgcggatgcgcgcgcaacttccgcgccttcgtcgaacacccgcacggtcagctcgccgccgtccaccgccgcgccgcgcaccaccgctcgcaacgtgagccgcccttcgacgctcgcgtcgacggccaaccgttcgatgcgcgcttccggaaccgcttccagccacacgctctgccagatgccgctttgcgcggtgtaccagatgcccccgcgcttcagccgttgcttgccgcgcagctgcacgcccgcgtcgctcgggtcccacacgcatatggacagctcgttctcgccggagaccagcgcatccgtgacgtcgaacgcgaacggcaggtagccgcctacgtgctcgcctacgcgcaccctgttcacatagcatgcgcatgcgtagtccacggcttcgaagtgcacaacgaggcgccgaccgccctccacgtccatgccgtccggcacggcgaacggccgtcggtaccacagaagctcgtccggctgcaactgccgctccgcgcccgacaggggcgcttccggcgagaacggcacgaggatgcacccgtcccaggcgttcggaggggcggcatcgcgccaggcctgcgcggcgctgtcggcgtcgacgatggcgtagtcccaccagccgtcgagcagctcgaaccccgcccgcgcgaactgcggatgcggatgcagccccgcacggcccttgcctgcggccgcctgctcgctccacggcgtggtcagcggccgcagctccgcttgctccggcttgcgcggagcgctcgcgatgacgcgcttgatgtccagcatggccgcttgtccttccttgtcttcgaagcgccctagaagcgctcgtcctttcaggacgcttcccgatgctcgcgttcacgctgcgcgcggacgaacggcagcacggcgaacgtcagcgctcccacgacggcgcctcccaaaaatatcagcgacgacggcgtgaacccgtcgcccaccacgccgaacccgacagcgcccgacgtggcgctcagagtcgacccgatccacggccccacgagcatggggacgagcaccgccatgaagatgcgcacgccctgaaacatccccacgtgcccggcgggcgtgttgttgcgcacctcggcgccgaagcacgccaccgcgcccaggtagccgcacagcatgagcaccgatcccgcgaacacgcctgcggcgctggtcagcagcgtgagcacgaggcatcccgcgacgaacagcgccagcggcacgatcaccgagcgcaggaaaccgcggcggtccaccctcttgccgtacaggatggtgaacacggcggcaatgacgatgcccggtgccatcacgaacacgtagctctctcccaggatgtagggaagccgcaggtacagcacgtagcagggcatgaacacctgcaacgcggtggcgaacacgaggtaggccagcagcaccaggtacagcatccggttctcggccaccgcgcgcggccggaagccgtacagcacgcttgccaggtagccgccctcctcgcgccgctcgggcgcggagtcgtccatgagcagcagcaccgcgatgccgagcgccaccacggcggctccgatgacgatgaagaacagcgggtagtcgtaggtcaccgtgccgtcaggccgcacgatcatgaggaacatcgcgccgccgaacacggccagcatcgccagcagcggcatggccgagttcacgccctccaccttgccgcggttcttctcggtggtgatgtcggtgacccaggcgttgaagcacgagtcgttcgccaggctgccgaagaacgtcatgatgcagtcgaacacgatggtcagcgtcacgccgaacgccatggccgccgcagtcgagccggccagcgccagcgagatggtctgcaagtaggcgaacacgatgatggacaggccccaaaggacggtgccgatgccgatgaacgccttgcgcttgcccgcgcggtccgaccacgcgcccacgaacagcgtggtggccgccgcggtcagcgccgaggccgataccatcagcgccacgtcggacagcgacgcgtcgaacacgtcctggatgaacaggttgaagaagttgttctcgagcgcccaggccacctgcccgaagaacgacagcaggatgatgagcgcccacgacttcttcgtcaggccggggcggggaggggcagcaggttcggcaagcatggccacgtcgattctctcgaggaaacgcaacctgctgccatcctaccggattcccgcccgtcgcgcacgcgtcgaagcgccgcgtttcgctttcagctcatgagcaggatccctcgcgatcggcgctttgccggcctgatcggggaggcgagccgaaggaccctgctctacctgaccgaggcgcatgcgctcggcaccgtgtttttggcagagatttagaggtgtgtgattattcgttcggcgaggagtcatcgaaaagagggatacgtgtgcaaaatgccaggttgctcttcgccatccgagcgattctgactgaatgcgtcgaacggaaaatcacacacctcgaaatctctgccattttcgagatcattgccgcagatgtctcatgcgcccttaagagggcggccaagtcgaagatccgccgccttacttccaccatcctcggccgcttggccgacgacgacctgttcgcagcctcggtggtgctgaacacgcagctcatgctcgagcaggggcaagggcgagacggccgtccggcaccgtacggttccgagctgtacgcgctcacggcgcgcatcgtcgaacagggtcagcgcgagggcagcgtggtggagggcgatccgctcaagctggtcgactactactggggcgtcgcgtacctgtatgcgctgaaacggctgttcactttcggatacgacatgatcgacgcggccgatatggagcgaacgttgctgaaaggcgggcgctagcatgggcgcgcgcatcgcgctggtcaccggtgcgaccggcggattggggcgcgtcttcgtggatcagctgctcgaggaggacggcctcgacgaactctgggcggtggctcgcaccgcgcagaagctcgaacgcctgcgcgacgagctgggctcgcgcgtggttccgcttccggtcgacttggctaacgcatcgggactgcgaaccgtcgcgcgcatgctcgaggaggagcgcccgacggtggcctatctggtgaacaacgccgggacggccaagatgggcgcatgggacgagttctccgtcggagagatcgagcgcacggtggcgttgaactgcacggccgtcaccgcgctctgccggacatgcttgcctttcatgggaagggggagccgcatcctgaacgtgtcgtcggcttcggccttccagccaacgccgtacctctccctgtacgcggcgacgaaggcgttcgagctcagctactcgcgggcgttgcgcgctgagctggcgggcaccggcgtgacggtatgcggggtatgccccagctgggtggacaccgacctgctcgtgcgcgaggtcaacgggcgtcgcgtggccttccccgggctcgtgccgcccgagaaggtggtcgcccgcgcactgcgcgacgcgcggcgggggcgggagctttcggtgtacccgctgtacgcgaagtaccttcacgcagccgcgaaggtggtgccgcaacgcgtcgtcatggccacctggctgcgcatgctgaagcgttacgaaggttgaagattcggggaagcgatgctcgcagcgttttcgcttgcggcctttttcctcctatggtataaacgacggcgtcaacacgacctgaggagcatgacttctgttacacgtacgcacggagattgtcgtaaaccgggaggtttgcgagctctagtctccgcacgaacctcccaaacaaggcaacgaccatcatcgttttgggagaaccaccgtggaaaaattcaagagaggcagcgccttctatcaggctcatgcctgcatggacagtttcgtctgcaaacagtgcggccggatcgtcacgcccgacggggcgggaagccgccatcgcaaccattgcccccagtgcctgcacagcctgcacgtcgacgagcggcccggcgatcgcgcttccgtgtgcgaaagcgtcatggagcctatcagcgtgtgggtacgcaaagacggggaatgggccatcgtgcaccgctgcaaacgttgcgggcacctgagctcgaaccgcatcgcagccgacgacaaccccttaaagcttatgtccatcgccgtgaagccgttggccgagccgccgtttcccctcgaagagctcgggccggacgcatgcggagggcaagcgagcgaagggggcgatgcgcgatgacggccgtcgacttacgtgcgtacggtgtgaccgacgcgatcatgcggcaggcgcgcgaggcgtctggtatccacgaccccgtcgtagggcggatcctgtcccaggcgcacgagctgtaccgtgtcgtcggcgagcaaggcgagctgttcgccgaagcgtccggcaagctgcgccacacggcgtgttcggccgccgacttcccggcggcgggcgatttcgtcttactggatcgtgcgaccgatacggcggggcgcgccgtcatcgcccaggtgcttccgcgcacgagcgccttcgtgcgcaaagcggccggcgcggcgctcgagcaacaggtggttgcggcgaacatcgacgtcgcgtttctctgcatgtcgctcgtcggggatttcaacctgcggcgtctcgagcgctacctgacgcttgcgtgggagagcggggcggtgcccgtcgtcgtgctgacgaaggccgatgcatgcgacagcctggaacggcggctcgccgccgtgcagtcggtggccttcggcgtcgatgtgctggctgtgtcgtcgatgggggagtgcggctgcgaggccgtgcgcccctacctgcggccgggcagaaccgccgcccttctgggatcgtccggcgtgggaaagtcgacgctggtcaaccgcttgttgggcgaggaagttctcgagacgcgcgacgtacgcgccgacgggcgcggccgtcatgccaccacgcgccgccagctcgtgctgctgccgggcggcggcctcgtgatggacacgcccggcatgcgcgagctggggctcggggaggccgccgggggcttcgagcaggggttcgccgacgtggagcgcctgttcgcctcgtgccggttctcgaactgcacccacacgtccgagccggggtgcgccgtctacgaggccatcgcggaccgcgagctgtccgagcgccgctggcaggcgtaccgcaagctgagggccgaggccgcgttcgccgaggacagggcgggctacctggctcgaaaggaacggaagttcaaggatatctcgaaagccgtcaagcgtctgcccgcaaagcgctgatacgggcgggcgacccgcccgccgcgcccgccccgcccgggcgtgcgcggcgcttccgggctcctacatcgtgtcccaggggtggtcctgcctgtactcgtggatgtcggcccacatgcacgagcagatggagtagccgccgtcgcacaccacggcctggcccgtgatgttgcaggccagcgggctgaccaggaacagcacggtgttcgccacgtcgtcggccgtgccgaagcgcttgagcggcgcgtggcgcttcagcatgtcgaactggaactgcaccgactcgttggtcttggcgtatgcgaggatgcggtcgttcaagatggagcccggcaccacggcgttgcagcgcacgccccggtcgccgtactggacggccaccgagcgggtgagcgcgttgatgccggccttgcagcatgcgtaggccgccgtggtgtcctcgcccacgagcgaggccaccgagctgacgttgacgatggcgccgccctgcttcagcagatggggcaggctgtggtggatcatgaggaagtcgccgcgcatgttcacggcgaagatgcggtcccacgcctcgacgtccgtctcgtggacgtacccttctttgagctgcatgaatccgcaattgacgacgatgtccagcgcgccgtagcgctctgacgcgccctcgatcaacgcgacgatcgtctcctcctgcgcaaggtcgaactctgcgaacgtcgtgtcgaagccctgcgcgttcagctcgtcggattgccgccgtcccgcggggtcgatgtcggccatgaccaccttcgcgccctgctgcgcgagcttggcggcgatggcgaaccccgtgcctcccgcgcccgatcccgctgctccggtgacgatggcaaccttgccgtccaatccgtaatcgaccatgatcaacgcctccttctgcaggcgcgtgcagcgcccgacgcgggtttgccgtccgactcgcagtataggcgaaaaaagaacccggcgcatcgcggcgccgggttcgttacctgcagggaagggatgccggaggcggcgctgccttacagcgtctcgaagttccaggagctcatgtacttgacctgctcctcggtgagctcgtcgatctcgatgcccagcgtttccagcttcacgcgcgccacgtgcgtatcgatggcggcgggcacgtcgtacactttgttctccagctcgccggcatggaggtacaggtactcggcggccagcgcctggttcgcgaagctcatgtccatcacggacgcggggtggccctcggcgcacgacaggttcacgaggcgaccctgcgccagcacgatcaccgtgcggccgtccggcagcgtgtactcttccaccagcggtttgatctcctctttcttcgtggcgtggtcttccagccactcgaggttgatctcggagtcgaagtggccggagttgcacacgatggcgccgtccttcatgttctcgaacgccgggccgtccaccaccttgcagttgccggtcacggtcacccacacgtcggcgaagcgcgccgcctcggctgcgggcatcacctcgtagccctccatgtgcgcttcgagcgccttgagcgggtcgacctcgcacacgatgacgcgcatgcccatgcccttcgcgcgcagggccaggccgctgccgcagtagccgtagcccgagatcacgatggtgcggccgcacaggaggcggttcgtggcgcgcacgatgccgtcgagcgtggactggcccgtgccgtagtggttgtcgaagcagtgcttcgtgttcgcgtcgttgatgttgaacacggggtaggcgagcgtcccctcggcggccatggacatgaggcgcacgacgcccgtcgtggtctcctcggtgccgcccaccacgtgcgccagcttgtcggtgaacttggtgtgcaacgcggtgtcgaggtcggcgccgtcgtccatgacgatctgcgggtcgcaggcgatgacggcctcgatgtggcggttgtaggtgtcggcgtcctcgccggcgacggcgaacacgtcgatgccgaagtcgcgcacgagggaggcggccgtgtcgtcctgggtggacagcgggttggaggcgcacagcgtcaccttcgcgcccgaggccgagagcgcgcgcatgaggttcgccgtctcggtggtcacgtgcatgcaggcgccgatgcgcacgccgtccaagggcttctcgcgctcgaagcgctcgcggatggacgccagcacgggcatgtcgcggtccgcccacaggatgcgggcgaggccctcgtcggccagggcgatgtctttgatatcgtggttcaagggtatgcctccattgacatataagggaacgtgcgattctcgatctctcagattatcatagccgaaccgacctagttatgaagttcgtatgcagaacctttgtgaataccggtgatttatgacctcgaattcggaagaaacggtaacgaacggactcgttgttgccccgaacggctgctcacccgctataatctgtccagcttggaacgcgttacagccagagcgccgcatgggcggcgaacaggcggcgttccgcacaaccctcagacgaaaccgaacaacaccaggggggcggagcgcgacccgcaggacgggtgcgcgatggcacggccgcaaggagcgttcgcggcccgacaaaggagcaaaggtgctggaccagtttttttcgcagatctcgttcgttgacatattcaacttctgcgtgtttctcacgttcacgatctgctacacgtatcagctctactacgtgttcgtggtgctgacgcgcaagcccaaggagctcacggcgaagaagaaccacaagttcgccgcagtcatctcggctcgcaacgagagcgccgtcatcggcgacctcatccactccatcaaggtgcagaactatccgtccgagctcatcgacgtgttcgtcatcgccgacaactgcacggacgacaccgcgcgcgtggcccgcgaggcaggcgccatcgtctttccccgcagcaacgacaaggaagttggcaagggctacgcgctcgactacggcttccagtgcattcgcgagcgctacgccgacaagggttacgaggcgtacttcgtgttcgacgccgacaacgtgctggatgtgaactacttccgcgagatgaacaagaccttcgacaacggagcgaaggcctcgaccagctatcgaaactccaagaactacgactccaactggatatccgcgggctacgccgtgtggttcctgcgcgaggcgaagttcctgaaccaggcgcgtctcacgctgaacaccagttgcgccgtgtcgggcacgggcttcttcatagccgccgacatcatcgagaagaacggcggttggaagtggcacctgctcaccgaggacatcgagttctctgcgaacagcattctcgagggcacgcgcatcagctacacgcccacggccatcctctacgatgagcagcccatcacgttccgcgactcgtggaaccagcgcttccgctgggcgaagggcttctaccaggtgttctggcactacggtgcccgcctggcgaaaggcatcgccgtgaaccccaagggcgcgcgcttcgcttgctacgacatgctcatgaccatcgcgccgggcatgctgcttaccatcgtgtcggtgctgttcaacgccatcatcgtgttcctcagcctcaccggagccatgtccacgggcatcatggttgcctcctcgctgtcgtccatcctgttctgcctgctgaactacttcatcttcatgttcatgttcggcgtgctgaccacgttcgtggaatgggactccatccgttccaccacgggcaagaaggttctgtacatgttcacgttccccgtgttcatgatgacctatatccccatcgcgctggtcgcgctcgtgaagaagtgcaactggaagcccatcaagcacagcatctcggttgatgtggccgagctctccgacgcggcaagcgccgcaccccaaaagcagcgtgagcgcaccatgtagcacacggtgtcaagtcgatatgcgaaagcggcgggcctccgggcccgtcgcttttttgcgcccggttggcgcacgtctgcatcctcgcccgaaaaacacgcctcgatgcatgaggcgtgtttttcgggcgaggatggcttccgacggcgccgatgtgcttgcgagtcggggaggggttaccacacgcgggcgaaggtgaggcagcggacggtggcggctccggcgacgcggacggcgtcggtcgcggcgaacagcgtggcgccggtggtgtacacgtcgtcgaccaggatgaccgaggggaaggcgcttgcgccgggcagcgggatgaagcggccttccatattcgccaatctgtcgcggcgcgcgagggcgcgctggtcgcggctgcgggggcgggcgagcacgggcgcgacggcgaggcccaggcggtcggccagcgcctgggccagctcctcgccgtggtcgaagccgcgccgtctgtgggcggcggcggtggcgggcaccggcacgatgcagggatggtcggcgagccaggagggcggcgccatcggcgccatgagcgtcgccatggcgcctgccaatcgccgctcgccggcatccttccaagtgcgcacgatgcgggcggcggcatcgtcgaaggcgacggcgctcgcgcaggcgtcgaagggcggctcgtcgcgtccggcaacgctcatcagcacgtcgttgcactcgctgcactgcacgcggccgaacggcgcgccgcagcgcgggcaggcgcgccaccagtcgatatggctcaggttgaggctgcaaggcgcgcacagcacctcgcccggggtgtcgcatacggcgcagcgcgtgggccacagcgtctcggcgatgacctcggcggctccgcgcccgtagaggcccgccgtcctcagcagacgctcgtggcggggaacgcgcgggcatgcgcctgctttccgtgcggtcgggcgtgcgagggcgagggcgagggttgtgcgggcgatcgtcatcctacgaggatagcacggagccttccacgcgccgcacacggcgctctcatgtccggcacccgccgttctcgcgcggattccacgccgatccagcgtcgtttccacgcgctttcccctcgtttctcgcgcgcttctcgcatgtgcgccgcaggcctggccggcgtcgcgaaagcatgcgcgcttcacagggccttgcaggcctttcgacgcgcggagcctcgaaggagcggcgtcccctcatcgtgtccggcgttcggacggcgtgcccgcctggagccttttcggcggcgtccgcgcgtttctcgcggattgtacggctcggctttcaggcgttttcatgatctggtacactgagtgacgcttctttcgagtctgtagttgcgggtttttcaacctcagtccacggcagatgcggtcgaaaggacccacgtaagccgcgcggtctccgcgcgacgatcatggcgtatcctagaggtaagccgcaccgcctgagtatcgcgacatccggttgcgacgggcgagagggcaaggcgcaagctgagttccagtgcgcgagtgtgggggcaaagactaggtcagtcgaaagaggcagcatgaacatcaagctagatggaggctcaccggttatgaagcgttataaaacgctcgcgttctgctgcatggcggtcgcgtgcatggcagccctgctcgtcgttctgacgggctgctcatcgcagcagagctacactccccccgagaagacgcccacgctgtcctcgccgaccatcggcaaggacggtacgctgcgcgtcggtgtgaacaccgacaaccagcccctggcgggacagccttcctcctcgtccaaaatcgttggcatcgacgtggacgtggcggcggcgctggctgacagcttcgggctgaagctcgaggtcgtcaacgtgggatcggatgccgaatcggccctcaaagagggaacggtcgacatcgtcatgggcatcgacaagtccgacagcggcacctcgttctggaagtctgacgcgtacctgcctacggccgtggcgttgttctccgcgccgtccaacacgcaggttcccacgaacgtcgtcgagacgaagatcgccgcgcaggtgtcgtcgaagagcgcttgggcggtgacgaacgaattcgacaaggcaaccttctccacgaccgacgacctcaagagcgcgttcgccgagctggcctcgggccaggtgcagtacgtggcggccgatgccatcatcgggacgtacgcggcgcacagcgcgggcgacgacgtgcatatcgtggcgctcatgcagcaggcgggcggctacggcgtgggcgtgtcggatgcgaacaccgatctcaagcaagcggtctccgaagccctcgccacgctgaccggcaacggcaccatcggcgtcatcgagacgaagtggctgggtaccgcgctcgacctttcgtccacgccgctgactgccggcgccaccaagtccacggacgcgggcgcgaccgttgcttcgaaggagccgaaagacgagagcgaaggcgagaacgctgacggggacgctgctcctgccgacgaaggcacgggcgccggcgacgaggtgaacgcgggcgagaacgccgtgcagcctggagacgtcgctgcttagagccgagatcctcccgaacgttcgaaagccctggaacgccgacaccgtgcgtccggggctttctttatggcggggaaggaaaggcgcttgacttggagtgcgctccaagtggttcaatggtcgacgatcggtatcatgacggaggttgaacatggagcaacgacaactgcgcgagctgctcgagcgcgtcgcggcgggcgagaccgccgtcgacgaggccgagcaggcgctgcgcatcgccccgttcacggagctgggctacgcgacggtggacaaccatcgcggcatgcgccagggcgtgtcggaggtggtgtacggtgcgggcaagacggccgagcagatagcgggcgtgtgccgcgcgctcgtggagaacgggcaggagcgcgtgctggtcacccggctcgacgccgaaaaggccgccgcggtcgaacgcgccctggaaggcgcgtgccctctcgcgttcgcttaccgccaaggcccgcgtctcggcatcctgggcgaggcgcccgagcccgacggcaaggggcctatcgtgatagccgccgccggcacgagcgatctgccggtggccgaggaggccgccgtcacggccgagatgctgggcaacgacgtggtgcggctgtacgacgtgggcgtggccggcatccaccgcttgctcgcgcatgccgacgacatcgcgcgggccagcgtcgtggtggcggtggcgggcatggagggcgcgttggccagcgtggtgggcggtctcgcgtcgtgcccggtgatcgccgtgcccacgagcgtgggctacggcgccagcttcggcggcgtcgcggccctgctggccatgctgaactcgtgcgcctcgggcgtgtccgtcgtcaacatcgacaacggcttcggcgcgggctaccaggcccatatgatcaaccatgtgaaagcgaggacggcatgacgacgttggtttggaacttggaagagaacgctacgcggcggcacctgctggccgaggcgttgctgcaactgcccgaagagcggcgcgcgcaggtgctggaggccgccgaagcggccggcgtgcccgacgggcatcatcgcgacctgggcgaggtgaacgccaccatcgatgcgctcgatgcgagcgagcgggcgaaggacgacatgcgcgccgtctaccgcatcctcgccgaggccgaggcgacggcgcacggctgtgcggtggaggagacgcacttccacgaagtgggcaacggcgaggcgctgcgcaacgtgctcgctatctgcctggccgtggaggcgctcgacccggacgagatcgcggccacccgcgtgcagaccggcagcggcaccgtgcgatgcgcccacggcgagctgcccatccccgcgccggccaccgccgccatcatcgcccgcggcatccccacgtgcgagcgcaagctggaaggcgagcgctgtacccccacgagcgccgccgtcatcctccacttcgtgcagcgctacgacgcgtagcaacccgctccgccgctccgcgtcgtagcgcttcgtcagagtgtttcacgtgaaacactcgttcgagcaaacaaatgtttcacgtgaaacatccgcgcggcatttggagggagaacaacgcctcgcgggttggcgtagtgaggcagcgagaaggcctccggcgttcggagttgtcccgctgcgctgccaagcgtacttcggtacgcgccgagcggcgcacaaggggcaactccgaacgccgggggccttcgcagtgtcgagtcgttccgccggccgtgaggccgacggaaccggctagttcaggaagtcttcgaggatctcctgctcggcttcctcttcggtcagacccagggtcatgagcttcgtgatctggtcgccggcgatcttgccgatggcggcctcgtgcaccagcagggcgtcctcgtgggcggcctcgatgccggggatggcggtcaccttcgccgtgcccatgaggattgcgtcgcactgcacgtggccgcggcactgcgcctcgccgatgaccagcgggttgaagatctgcttggagttgtcctgcgccaccgagcgcgagattacctgcacgctggaatcgtcgcccttgagctccaccttcatgttcgaggtggccacctggtcgtcgtgggtcagcagcttctcggtcagcaccagcttcgcgcccgcgcccagctcggcgttcgtgtcgcgcacggtggacgacacgccgcgcagctgcgtgagctccatctcgcagctggaattctcgtccatgatcacgttggtcacggggttgaggatgcgctcgccggtgccggtgccttcaccgtagtgcttctccacgtacttcacgtggctgttcttgccgcagtagaacgtgtggatgccgtcgtgctcggaggcctggtggctctcgttgtggatgccgcagccggcgatgatggtcacgtcgcagtcgtcttcgatgtagaacgtgttgtacacgacgtccttcaggcccgactgcgtgacgatgacggggatgtacaccgtctcgcccttcgtgcccgccttgatgcggatgtcgatgccggggttgtccgtcttcgtggcgatctcgatgttcgccgaggagtggcgctcgacgagctcgccgtccttacggatgttaaacgcgcctttcggcatgccgtgtatgttggcgatctcggcgagcaggctctcgtcgatgggggaaagatcaacagccatgatggcctccttctgggttcaaagcggcggcttcgtgcagctgccgcgtgcgtgaaagcgaacgaatgtttcacgtgaaacattcgcagcgcggcgtgggcgggttagcaggtggtggcgatctccgtgaggtgcagctcggtgggggtgctcagctggcagccggggatgcccttcgccacgaagcccagcttcggcatgagctcctcgggcgtgcccgtctcggcaaccttgccgtcgcgcagaagcacgatctcgtcggccagctggatgatgcgctcctggtgcgagatgatcacgatggagcggccgtcgcgcgcctcgtggatgtcgcggaacgtctcggtcaggcggtcgaagctccacaggtcgatgcccgcctcgggctcgtcgtagatggccagcttcgggtcgcgcgcgaggatggtggcgatctcgatgcgcttcacctcgccgccggacaggttcttgtccacctcgcgcgtgaggtagctggccgagcacaggcccaccttcgccaggtactcgttgcacgcgagcatcggcagcttcttgccggccgcgatgtccagcagcttcttcaccttcatgcccttgaagcgtgcgggctgttggaaaccgtagccgatgcccttcttggcgcgctcggagatggacaggtcggtaatgtcctcgccgtccagcaggatctggccgctcgtcgcgcgctcgacgcccatgatgagcttggccagcgtcgacttgcccccgccgttcgggccggtgataaccgtgaagcggccgtcggggatggtgagcgacagatcgtcgatgatgcgcttcgtttccttcgatccgtccgcaagcggcacctcgaaggtgaggttcttgagttccagcataacagcagctctccgtattcttctcgtctatttgatactgtattactatcattattgcggcgctcggtcaagcgcggccgcatgctcggcgacaggcgcgtccgcctcggccgtcaacggccgggacgacccccggatccaatcgcttcgcacgcactcggttccaaccgcttattctagctcaagcgcgaggacgtgtgcttcggaagtgcgattttcagggcttgccaggcaaaggccgggcgtgcgagcatccggcaggggttcgggtggcgataatgcatcgaattcggaactctcagggctgcgttgcggagagcccgaggggttcctttcgacggaatacctggtcgcaaaatgcgcgacaccatagcagggccgctattcgcgctttcggcccccgcgcgtattccgaattcgatgcattgttgccattccggcctcggtccgtgatcgccgtgacgcgctgtcgcggttgcgtgcgaaaggggctgggcgcgaggcggccccggcgtctgcgtcggggccgcggtcgaagcgctctgtttacgtcgcgggcctactcgttcagcaggtcgatcaccgcgaggccggcatcggacgcctcgatgatgtccttgctgccgaacacgcacacggcgtccatcgcgacggcttcggcgatgggcccggccagcgcgcgcagcgcagcggcgtccgcgtcgatcatctgggcgcgcgtggcggcacggctctcgggcgtgcgtccgccgaagaagtcgccgtcctggcgccgcacgagggcgcgcgccttgagcggggtgtcgaacccggccacggtgctcaccacgtagccttccatcgcctcggcggcggggtcgaacttggccaaccactcggaagccctggcgaagcgggccagcgtgtcgtcgaggtgcgggtcgcgatacgagtagaagcgcagattgccggtgcgcgccgtctggaagcccgccccgtacgcgccgcccttcacgcgcacctcgttccacaggtagtcgtaggaaagcgcccgcgcggccacctgccaggcgcccgtgtagcccgcgtcgaaggcgcggcggtcgaagccctgggccgcatagcacacgtcggtgggcacgatgaacgcctcgttgagcgccacggggtcgggcgcgatcaagcgcacgccgtcttcggggcgcgtgcggccgagcgcggcgcctgcggccaggaagcgttcgtagtcgtcgtccgtgccggtgaagctcagcgtcagagcgtcgtcggcgaacagacgcacggcgaggtcggccaggcgtgcggacacctcttcggcgcgctcgtcgaacgaggccagcagctgcttgaggaagcggtagaacccgacgccgcccagctgctcgcgcaccacgccggccggcaggtagtacgaagccaagtgcgccatagcgctagcatgccccgcgttcgcgaagccctgctccatgccgatgcggcgctgctgcagcacgtccttgatcttgcccgtgtcggagaagtcggtctccagcatgatctcgcggggcagctcggccagctcgcggacgttctcggtcagagcgctcgagctgacgacgaacttcggagccagggcagcggggtcggtctcgctctcgtagatctcggcgaagaacgtgaggttgcccagcttgccgttgacgagcgtgtccagctcggaggcggtatgtcgtgcggttcccagcttgcccagcacgaggcccagaacggccacgtaaggtagttcgtcgaacgcgacgcggtcgaggtcgaagtagcggtaggcgtaggcgatgccgtgcgtcggcacgtcgtggcgcagcgtaggaacgggcgcgccctccactaggccgtacgcgggctcctcgggagcgtcctttatgtcggctaccgacaggcgcggcagcacggccaaagcttcgggcgagtcgggctcctcctgcaagcggcgcagcgcggcctcctcgtcggccacgcgaacgtagtcctcgggagtcatggcggcttcgacggcggccaggcgttcctcctcgtaggcgtcctcgtcgccgtcgactggcacgatctccacctcggccatatggtcgctgtccaggaacgcctcgcggatcagccgctcgaaatacccctcgtccagcgctttgcgcagaaacgcgaagtcgtcctcgtacttgaggtaggacgtggccgcatcgtcgtcgtacagccagcccgccagcgagctcatcgccagcgccacgccgtcgggcatgccgtactcgcgctcgcgcatgacgaactcggcgcgcgacagcgacgcctccacgagcgcgcggtcgagccctccgtcggccagcttgcgcagcgttttctccacgaccgggcggaaacgctcggcaccgccttcctccagtccgcgcagctggatgaccgcgaacggctgcagcagcgagtcggcgaagaacgccgtagcgtcggccgccagccccgcgtccagcagggcgcgcttgagcggcgcctcgttcgagcctgcgatggcgtcgatgaggatgtccacggccgtcatgcgcgtgcgctcgcacgcgttgccgatgacgtagcccagcccggcgcacgcgttctcgggcgcggtagccatgttcctcttcacgcccagcgcgcgtacgggcgcctgctcgcgcagctcgtgggggccgagaggcgcgccctcggagccgatgcccgtcgcggccgcctgctcgtcggcgacgggggacagatagcgttcgtcgaggaaggccagcatgccgtccaggtcgagatcgccgtacaacgtgaggtagctgttgtccaggcggtagtggcggcggtgctcctccaggaactgctcgtaggtgaggtcggggatggcgcgcggcgtgccgcccgactcgaagcggtaggccgtgtcggggaacagcgccgcctgcagctcgtcgtacagcaccgaattcggatcggacagcgcgcccttcatctcgttgtacaccacgccgttcagcacgaggcgcgcagacccgtcggcggcttccgtggcggccacggcgtcgcctgcaacggagtcgcccgcttcggcttccgtgtcgccgcccagctcgtagtgccagccctcctgttcgaagatggcgcgtttacggtagatggccgggtgcagcaccgcgtcgaggtacacgtcggcgaggttcagcaagtcctggtcgttcgtgctggccaccggatacatcgtcttgtcggggaaggtcatggcgttcaggaacgtctgcatcgagcttttcagcaggtcgacgaacggctccttgacgggaaacttgtccgagccgcacagcaccgagtgctccaggatgtggaacacgcccgtgtcgtcggcgggcggcgtcttgaacgcgatggagaacgccttgttgttgtcgtcgtttcgcaggtacagcagctgcgcgccgctcttgtcgtggtcgagcacgtacgccgtgccgtcgatctcgggaagttcttcgcgcgtgcgcacggtgaatccgtgcagcttctgctcgggagcaaggtccatgcaatgccgcctttccggatgagctcgataccgataatcggccgtcgagcgcgagttcgtgtgtcgacgtctatgatagcgcgaacaggtcgcatcgtcgtcagggttcgccgacgatccggagaatcgttgcacaccggttaagcccaaggcgctcatgcggggcgagaggcccgcccaagcaggcaggcctctcgaaggggagggggcgattgtccgatgccgctaggctgcggaggcctccgcagcggcgcttcgacccgcgatgcgaccgagcgtcatcgcgctgagtaccgtggctccggcggcgcagttccactcgcataccacgccggcggcgtacaggccggggatcggttcggtcagcgagccgctggaagccaaggcgagcctgagggcctgagcctgctcgttcgtcttgaagccaccgacggtgaccgaggtgctcacagcgataggagctgcgtagaaggggccggtcatgggcaccatcttgtcggcgggagttccgcagtcctcgtccttgcccgcttcgcagaagccgttatagcgctcgacggtggccttcgccttcgcgccgtcgaggcccaccatgccggcgacttcctctacggtgtcggcggtggcccatttcagcgggtacgtggcctgcatggcgtccagctcgggcgtggttcccagcaacgcgatgaccggcgatccctgctcgttctgcttgcgcacgatggcgcggtgcccgttggggttttcgtagggggtcgattcgtcgaagaagcgttggccttcggcatcgagccagagccccggcaggcgcatcccgtagttgatgttgacgatgctgcccgattcaaggcctgccaacgagctcatcagcggcatgtccgagacgcgcgtggtgtaggcgcccagctccatggccatgaccaggccgtcgcccgtggctccggggttcgagcccggcagcaggttggcgcattcggcgttcatctgaccgatcatggccgtgcttccggcgaagctgcctgttgccatgaccacgcctttgttcgccttgatgcgtacggggttcttcttctgaaccgcctccacgccgatgacgcgtccgtcggcgtcggcgaccagcttcgttgccgaggtgtcggtgagcgtgcccacgccggctttttcggccgtctcggcgagcacgcgcaccatctcggcgcccttgccatcgacatggtggatgaccggcagttcggtgtacccgaacagcggccctacttccttcaggaaaggcacgcccatctcctgcagccaatcgatcgtctctccgctcttgtcggccagcacgcgcgcgatggcgggatccttcggtccgtaccattcgggatgacgcgtgaaccagcggtacacgtcgtcggcgtcggcgtcgatgccctgctctttcgccagtttggtgccccagccgcccaagatgccgtcgctcagcgcggagtcgcctccgacggcgctggccttctcgagcagcagcacgctcgcacccgcgttcgcggcttcgatggcggccgcgagtccggccccgcctgctcccaccaccacgacatcggcttcctgatcccactcctgcgaatcgctcgaggacgtcggtgcgctgcatccggccaagaacgaggacgccgcaacgcccatagtcccggcgagcgccgctcctacgaatccccttcgcgtcatgcgctttccatcgctcatgatcccactccctttcatgatgttgtcgattgttcctccctttcggcttgcgcctggcgaaaagggtacgcggccatcgatttaactgtcaatatctggaaaattgatagttatctgaggctttcccgaagtgcgaaaagcggggaagccccgaagaaataccagttcaaacctcttgccaccgttgtccgttcccttgttggcattcgaacgagaagcacgtatcatgaactatcaaaatctatcaaatcgaggaggggcgatctggtggagacgaagacggccgccatgtccgatgcgacggtgcggcagatgatctcgcttttgaaggatccggtgttctgcggcctgcgcgtgttggcggacgagcgtccgctgacgcgcgaagagttcgaaatgcttgccatgccggagggcgtctcgcgcgagcaggcgtgggacatcctcaacgcgctgcggcgccagacggccgtcgaactgccgtttcgcgatggggaagggcggcgcggttggtactatcccacgcgctcgatcgtggcgaacctcgacgatatcgacaagcgctgccatgcagggtcgtggctcgatttggccgtgcgttcgcgcaacgccacgtactttctggtagaggcgcacgtggacgaggccgttgcgacgctgaaagaggacggtttgtccatcggttacgagaaggcgcgcgaggtgctgctttccgagcgcgacccggaaacctcggaagagcgcctccttttgaactggcatcgaaccgcctggcatcttgaggagcttgccggaaggccttgcacgcccgagatcgtcctcgaggtgtacgaacgggtttcgcgcggcgtggagcgccaggtcacccgttcgtcgcgacagggttcccgcttgtggaagcgcaagccgctcgatcgctctgcggcgctcgcgctcgtgtcgaagatcatcgaggagaacagcgaaacgtatgccgagcatccgctgttgctggccttgggcgtccgccacctgttcatgagcgtgcacccgctgccggattggaacggcgccgtgtgctcgctcatgatgaagctgttgttcaggaagacggaacggcccgtgttggcgtacgtgcccatcgtgaagcctatgggcgcctgggaaagcggcatccttcgcccgcccgccgtcatgtcgctggtgaaagacgccgctgtcctcgttgacggcgaggtcgactacaccatccacatcgacgtggcgacgggtttggtgcgcaagaagctggacgaggtcgaagcggagctcaaacgcatgctcaaacgtgatgaggcgttcgtgcgcgcgctgcgaaacgacgtagacgtcaatcatcggcagcgctccgtgctgcagatggccctcagcaatcctgaggcggtgtttcgcatcgagtcgcatcagaaaacccacaaggtcgcttacgccacggcgcgtgccgacctgtacggtctcgtcgaccttgggtttttgaagtgcgtccgcacgaagcgcgcctttgagttccccgtgacccccggccttcgccagctgttgacgcgctcttgacgtgcattcgcaaagaaagcgcccggtcatgaaaaagcctcccatttctcatgtccgagaaatgggaggcggttcgatcgcgcgggggcggcgaggttctcgttgtcagatcacggccgtcccggggccgcccttgtcgtagcggtggcaggccacgcaatgatcgggcttcacctcgaccaaaggaggcatgacctcgtcgcagccgttcaccttcgcgaagcagcggctggcgaagcggcagcccggcggcgggtcgatgggcgagggcacgtcgccttccaggatgatgcgctccttcttggcggcggggtcgaccgacgggatggccgacagcagcgcctgcgtgtacggcgacagcggatcggcgtacagcgccttcttgggggcgatctccatcatcttgcccagatacatgacgcctacacggtcggacacgtgcttcaccacgttcaggccgtgggcgatgaacaggtacgtcaggccgaactgctctttcagctcgtccagcaggttcaacacctgcgcttggatggacacgtccaatgccgacaccggctcgtcgcacacgatgagcttcgggttcacggccagggcgcgcgcgatgcccacgcgctggcgctggccgcccgagaactcgtgggggtagcggttgcgcatgtagttcgccaggcccacgcgctctaacagctcgttcacgcgatcctccacctggtctttcggcagtatgttgttcgtgatgatgggctcggcgatgatgtcgccgatgcgcatgcgcgggttgagcgacgcgtagggatcctggaagatcagctggatgtctttgcagtactgcttgcgctcggccggcttcatcgccgtcagctctttgccgtcgaagacgattttgcccgacgtgggcttcagcaggttcaccagcatcttgcctacggtggttttgccgcagcccgattcgcccaccaggccgaacgcctctcccttgcggatttggaagctcacgtcgtccacggcctgcacgtaggaggtcgccttgccgaagaagttcgtgtctgcagcgaaacgcttcgtgaggtgctggacgtcgagcaggatgtccagctcgaccgcgcccgcttgcgcggacgcggtcgcgttgctcgcggtgttctcgctcatcggctcgcctcctcttccttctcgatctcctcgatctccgcctcgcgcagatcttcggcagccaacagcgcctcggcggtctccacctcgcgcgccgcttcgacgtcggccagcgcctcggcctcggctcgggcgatggcttcctcgctcttcacttcgccgtcggcgctctcgtacaggaagcagcgcaccttatggccgtcgacgtccacaagctcgggaaccttcgtgcggcagatgtccatgcaggagtcgcagcggtctgagaaatggcagcccggcggcatctccaacgggttcggcaccatgcccttgatcatgtacaggcgcttcgaatcgtcgtcctccaggcgggggatggacttcagcaggcccagcgtgtaggggtgcatcgggtggtcgaacagcgtgcggacctcggcttcctccaccacctggccgcagtacatgaccaccacgcggtcggccgtctccgacaccacgcccaggtcgtgcgtgatcagcagcacggccatgcccgtgtcgtcgcgcaggcggcgcagaagatcgaggatttgcgcctggatggtcacgtcgagggccgtcgtcggctcgtcggcgatgagcagcttcgggttgcaggccagcgccatggcgatcatcacgcgctggcgcatgccgcccgacatctggtgcgggtagtcgttgatgcgtgcctcggggctggggatgcccaccttgcgcaacaggtcgacggcacggtccttcgcctcggccttcgacaccttctcgtgggtgcggatggcctccacgatctggttgcccacgcggtacaccgggttgagcgaggtcatgggctcctggaagatcatcgccatgtcgttgccgcgcagttcgcggtactgcttctcggacagggttgcgaggtccttgccttcgaactccagggagccgccggccacgtgtcccggctcggccaaaagacccatgatggagaggctggtcacggacttgccggaacccgactcgcccacgatcgccaggatctcgccttggtccacgtcgaagctcacgtcttcgacggcgcggacgatgcccttcttgacggggaactccgttgagaggttcttcaccgaaagaagcacgggatcacctcttccttgctttggggtcgagaccgtcgcgcacgccgtcgcccaggaggttgaacgcgagcacggtcagcgtgatggccaggccggggaatatcatgagccaaggcgcgcggaacagctcgttgcgcccgcggcccagcatgtcgccccattcggcggcaggcggctgcacgcccaagccgaggaagccgagggcggctgcgtcgaggatggccgtggagatgcccagcgtggcgcggacgatgatggacggcagcacgttgggaagcacgtgcttgaacacgatcttgaagttggaatcgccgatgacgcgcgcggcggccacgtagtcgttctccttgatggagaggatctccgagcgcacgatgcgggcgtactcgggaatggcgaccaggccgatggccacgaccgccttctcgatgccgggcccgagcgccgccatgatggcgatggccagaaggatggaggggatggccagcatcatgtccatgatgcgcatgatgacggtgtcccacttgccgcccttgtagccggcgatggagccaaggatgacgcccacggtgagcgagatggccacggcggccaggcccacggtcagcgtgatctgcgtgcccacgagcacgcggcagaagatgtcgcggccttggatgtcggtgccgaaccagtgctgcgccgagggccccagcagcgattcgccgaggttctgcgcgtacgggtcgtagggcaggatgccgggagccagcttcgtgacgatggcgatggcggccaggatcaggatgaagatgccgctgacgagcgacgccttgttggacacgatgcccgcgaacacgtctttccagatgctctcgtgcttctccttgaccggttggccgttcagcagcgcggcatcgccggccggctccgtggcgagcagcttgttcttcgccatgcggatcacccctcttccttcgcgccgtacttgatgcggggatcgaggtaggcgtacacgatgtcgacgacgaggttcatgatgacgaagatgaccgccaccagaagcacgatgccctggacgacggggaagtcgctcttcagcacgcagtcgacggcgaacttgccgatgccgggccatgcgaacaccgtctcggtgagcagcgcgccgcccaagaggcttccgaactgcaggccgatgaccgtggacacgggcagcatggcgttgcgcagcgcgtgcttgatgttgacggagcccttcgacaggcctttggcgcgcgcggtgcggatgtagtcggcgttcagcgtctccagcatgctggagcgcgtcatgcgcgtgatgatggccatggagtacagcgacagcgccaacgtgggcaggatgaggtgcaccagcacgtcggcgaggccggcccagttgccctgcatgatggtgtcgagaatgaagaatccggttcctcccgacggttgcaggaggggggacacgcggccgctcgacggcagccagtgcaggatgcccgagaacagcaggataagcaggatgcccgaccagaagatgggcatcgatacgccgacgagcgcgatgagcatgctcacgttgtcggccgccttgttcttcttcactgccgccagcacgcccaaggccacgccgacgatcgacgccacgatgatggcgcagatggccagctcggcggtggcggggaaacgcgccgcgatctcagccgtgaccggctggtgggtgtagtacgacgtgcccagattgccttggagcgcgccgacgatgaagttgatgtactgcagccagatgggatcgtccagcccgttgtcggcgcgccatgccgccatcgcctcggtcgttgcgtgctcgcccagaaccaccggagccgggtccggggccaacacgcgtgtgatgagaaagatgatgactgtcacacccagcaaaacgggaatcaccatgaggattcgtttgaggatgtatttgagcaactgctgctcctttctttaccgggatccgtccgggcggcgtgtcggcgccgagcgaacaggaatgaagccggaggcagtgccttcggcttcgagcgcgcgtccggtttcgcccgaacgtgcagtcgtggatcgaaaaagatcgcatgacagtgtagcgcacttgctctcgtttgacggcaagaacgccatgccgagcggtaatagaacccaaaaaaggggccgctcgacgccgagcggccccgtccgcgcgaagcgagaggcttacgcttccttggacacgcccttgaagaaggcgacgcccgtcggatggtagtagaagtccttgaccttcgggttgatgcccagcaggttcttggagtgggagatcagcacccacggctgcttctcggcaaccatttcctcgcacttgaggtagatggcgtcgcgttcatcgccgtcgggcgtgtcgacgccctgagcgatgagggccttgtactcgtcgtcctggaagtgcgccacgttcatggaccagttcgtgtcggccaagaggttcatgaagttgtccggatcgccgttgtcgcccgtccagccatagaagcagatatcgtagggatcggtctgcaccttggtcttgtaggtggtccagtcgtactcggtgatgctcacgtcgacgcctacctcggacaggtaaccttggatcatgttggccagctggctgccgcccttctggttgtaggggcgcgcggtggtgtacgtgatgcactgcagcgaggtgatgcccttgtcggccagggtcttcttggcggcctcggggtcgtacgccgtctgcttgacatccttggcgtacggagccatccaggtgggcatgaccgagttggcaacggtggcgtaatcgccgtagatggcctgcaccatctcttcgacgttgatggcctgggcgacggccttgcgcacttcctgatcggtgcactggccggtctcggtgttgaacgccatgtagttgatggtcatgccgtcctcggagaacagctcgaagccgttgctggtcacctggtcggccgacgaggggtcgacgctcgagatgatgtcgcactcgccgttcatgagcgaggtcaggcgcgtgttgccctcggcgatgatcttgaacacgaggttcttgaccttcggggcttctccccagtactcgtcgttagccacgagggtgaccgaagcgcccttcgtccagtcgacgaacttgtagggacccgtgcccttgggctcggcgatgggctggccgggggtagcggcatcgattgccgcaggggacacgatgggggaggccagcgccatggccaggttcttcaggaacggggtggacgcggcgcgcagggtgatcttcacggtggtgggatcgacggcctcgacggtttcgacgccgttgcccgcctccttctcgccgaacacgaacgacgcgtagggcatgtcggagttgcggttgggctcgagctggcgctcgatggacttcttcacggcttccgcgttgaactcggcgccgtcgtggaacttgacgccttcgcgcagcttgatggtgtacaccttgccgtcgtccgagatctcgggcagatcgactgccaggcacggggcgaccttcgcatccttggcgccgtactggtacaggccctcgtggatgttgcagctgaccactgcggactcgccgtcgtcgaagtacgccgggtcgagcgcgcgcggatcggccgtaaggctgtacgtgatggcgtcggccgcgccgccgcccgtcgtgtcgccgccgctcgcagccggcgcgctcgtgtcgccgccgctgcagcccgccatgctcaccaggccgaaacctgcggcagacacgccgagcagctcgacgaactggcgtctgctgaacgtgttcttgctttcttccatttgtcgttctccttccctcgcaccccgcgtcgaacggggccctccagcgagtcgtgcgactttgctgacgctttcgcgcatgctagcaaaaaagcgtatcaacatactctagtgcaataaagcactgtgcaccaggtaatttaccccatggaaacaaatatcggccgtctgcggcgcgaaaaaccgcccaaaggcgcctgcggcagcgcaacaggcgggcgcgagcggcacgattatcggcgcattcgggccaaaatcgcgttttgcatttcgctgcgcggcgcgctatactggcgggcgtacccggaaaccgagcatgaaaggctcccctttgcaacctgtcgccaacatcgtttgcgctgccagcgtcctcgcgacgccgggtatcggcgcatggtggtggagcagaacgcattaatcccgggtcccctggcttctgttcacgcacacatacttgtcagaagagccctcggagatccgggggctcttttcgtgcgagctgcacgaaccgaagccgactgcgaacatccgcggcgggcaagccgcgggaccgaccgattggaaaggaaacgaccatgaccgaacaagcaccgcatcgtctgtacctgcgcgaagaccagatcccgacgcagtggtacaacctgcgggccgacatgccggagaagccggagcccatccggctgccgaacggccaggtcgcggcacctgaggatctggcacctgtgttctgcgacgagctggtgcgccaggagctggacgacgacacggcctacgtcgacatccccgaaccggtgttggagatgtaccgcatctaccgcccgtcgcccttgtgccgcgcgtacaacctggagaaggccctcggcacgcccgccaagatctactacaagttcgaaggcaacaacacgtccggctcgcacaagctgaactctgccatcgcccaggcttattacgcgaaggcccaggatctcgacggcatcaccaccgagacgggtgcgggccagtggggcacggcgctcgccgaggcgtcggcgcatttcgggctcaatctggacgtgttcatggtgaagtgctcctacgagcagaagccgttccgccgcaacatcatggagacgttcgatgcgcacgtgacgccctcgccgtccgataccaccgagatcggccgcaagatgctcgccgagcatcccgactcctcgggctcgctgggcacggccatctccgaggccgtggaacgcgcgctcaacattcccggcaacaagggccgctacacgctggggtcggtgctcaaccaggtggtgctgcaccagtcggtcatcggcttggagagctacgctgccttcgaggagctgggcgagtaccccgacgtggtcatcggctgcgcgggcggcggctcgaacctggccggcctcgtggctcccttcatgcgcgacaagatcaagggcgtgcgtcccgacacgcgcttcgtggccgtcgagcccgccagctgcccctcgctcacgcgcgggcgctacgcctacgatttcgccgacacgggccgcacctgcccgatggccaagatgtacacgctgggcaacggcttcctgcccagccccgaccacgccggcggcttgcgctaccacggcatgagccccatcgtgtcgaagctgaagcacgacggctacatggatgccgtcgccgtgaagcagaccgacgtgttcgccgccgccgtcgagttcgcgcgcctcgaaaccatcctgccggcccccgagagcgcgcacgccatcttccaggccatggaggaggctcgccgctgtgccgagacgggcgaggagaagacgattctgttcggcctcacgggcacggggtatttcgatatgaaagcctacgacgcctacaaccgcggcgagatgagcgaccatgttcccaccgacgaggagctggaggtcggcttcgccagcatcccgcacatcgagggcgtgcagtaggcgcgcgccctgcgggcttcgggttccgcagcctatgcgttgcgggacccgggtgctactatggttccatgagccttttccaagccgaggacataaccgtctcctacctgcgcgccggcgtgcgcacgacgttgttgtcgggcgcgagcttttcgctcgaagccggcggcgtgtacgacctcgtggggccgtccgggtcggggaagtccacgcttttgcgcgtgtgtgcccgcatgctggcgcgcgacggcggggagctgttcttggacggcgcgccgtcctcctcgttcgagccggtgcaatggcgccgccgcgtgtgccttgtgccgcagcagccggcgctcgtcggcggcaccgtgcgcgacaacctgctgcttccctggacgctttccgtgaacgcgggctcggcgccgccggccgacggcgatttcgagcgcctgctggaggcggcggacttgcacgacgtggagctcggccgcaacgcggcgcagctctcgggcggccaagccgcgcgcgtcgcgctgctgcgcgcgttcgccacgcggccccgggtgctgctgctcgacgaggtggacgccgcgctcgacgacgagtcggctcgcgcggtggggcgcctgaccaaatcgctcgtcgacgatcgcatggcctgtctgcgcatccgacaccgcgctgccgacggcgtggcctgcggcaccttctcgctgcgcgacggggcgctgtcgtacgcgtcgcgcgccgacgccgacggggaagggacgcgctcgtgagcgggggcgtcgtcgacatcggctacgtcgagctgttctccgcgagcgcgctcatgctggtggccgggctcgtgtcgtggaagttggagctcggccagacgaggcgcatcgtcgtgtcgtcggtgcgctgcttcatgcagcttttggccgcggggttcctgctgacgtacctgttcgagttccaaacctggtggctcgtcgcgctcgtgctggccgccatggtgatagccgccacccagatagccgtgtcgcgggtgaagagccgcatacccgggctcgtcccctccgtgttcgtgtcgctgttcgtgtcgtcgttggtcgtcgggttcatcgtggtggagggcgtcgtgcacgccgacccgtggttcaacgcgcggcaggtggttcccatcgtgggcatgatcatgggaaacgccatggccgccgtggcggtggctatcgacaggttgttttcggacctcgatgcgcgcgcaagcgagatgttctctctcacggccttgggcgccacgccgcgcgaggccgccgcgccttcgctcaaggccgccatcggggcgggcatgacgcccgtgctggcgaacatgtcggcggcgggcatcgtgacgttccccggcatgatgaccggccagctgctggcgggagccgatcctctgtcggcggctaagtaccagatcgtcgtcatgctcatgctgtcggccgccaacaccgtcgccatcgtgacggcctgcttcatgacgtaccgcaagcgcttcgcgcccgatggatattatttggacgagggcatacgctaggataatcatctataatcgcattgacgtgaaaggacgatccgtggttgcaggcgaacccaagttttcccatattaccgtgacgcccgacgacgaggacgacgtcgtcatccaggcgggagcgcgcccgacgcggcccgctgatcccgcccccgcatcgccgtgcgaagaggagccggcgcccgagcccgagcccgctgcggcgaacggctcctcgaccgacgaggacgcgcggccgaagcgcgagaaggccgtgaacgagggctatcgggaaaccacgatggacgatctcaaagctgccccgatgccgcttgcgcagaaggttgtgcttgcgctcgccgcggtgggcgtggtcgcgatcgtcgcgtggtacctgttcttgcgctagcgcccccgttccacctgtcaggaaggttcaacgatgcccaaacatgctcccaacgtacccaaaggcaccccctccgaccgctccgacgagcgcatcggcctcaccgaggccttctcgcccgtgggcgacgcgcaggcgcccgtcgacggatcggacgagcgcatcggcttgaccgaggcgttctccccggtgggcgacggcgcgcatgccggcggtttcagctaccggggcgacaacgacgacgagtaccctgatgccatcgaggctcttgagccggttgacgctcctccgctcctgttcggcgacgataccgtagccgcggagcccgaggagccccaggggcgtcacggaaagcagaagaaggaaaagaagcagaagcagcagatccccgcctatcagcgcaaatcgcggcgcatgcgccgcgtgctcatcgccatcgtggtgctgctgatcctgttgatcggcgcgctgggatacttcgcatggcagtggttcgaggaaagccagctgatcgcgacgcagcagacccaagagcagcagagctcgcaggaagtgggttccatgcagaccgacgaaacgaaggacgccaccaccgccaccgctaagaagacggacgttcctaacctggccgccgtgctgggcatgacgaaggatgaggccatcgccgcgctcaagcacggcgccaccgagacgacctcgaaggaagtgaacgaagagggcaatcccgttaagacgaacgtgacggtggcccttaccgacgagccggccgacacgcgctccggcacgccgacggtgtacctcggtctcaacgaggacggtgcggtcgtgcaggcgggctactccgcggccaccgcgtcgctgggctacggctcgctcagtttcgtcgacgcggtgaagaacgagggcatcatcgagaagacgctgcaggaggcaggcgtcaatgtgcctgcgggctcggcgcagcttcccgccgacaaaaccgaatactccgaatacgcgagcgacggcaccacgctcgtcaaggaatcgtactcgttctccggcacggtcgatctgaacggagccgcgcacgaatggtcggcgctgctgctgtacaactactctacggcgaacacgtcgggcaacctcgccgacaccatccgcatcgtatacgtgtacgtcaacgcgtaacagggttccgtcagcctggcggccggcggaacgggttgacgccacgaccagcctcgctgacttactgcgccaacctgcacgcttttcgcccattgaccgctcgatacgttgcgggtagagtttgctgcagggcgataaccgacgaaagaggggcatccatgatcgatcggggcacgtgcaaggccatgctgcgcgagagcgcgcggctcatgctggagcaggccgaccgcttgagcgacatcgactcgaagttcggtgacggcgaccacggcatcaccatcacgaagatcgccaagctcatggacgagcgcgccgaggcatgggacgaggaatcgatcaaggacttcctcgacgacctgggtatggccgccatggccgtgcggggcggctcggccggcccgttgtacggcacgatgatcggcggtttgggcgcgcgcctcggagacgacgagaacgagctgtccgccgatgccgcgcgccgcatgttcgcaggctgcctggccgagatgcaggacatcacgaacgctcaagtaggtgacaagaccatgatggacgccttgatccccgctgtggaagccgcgcaggcgtgcgacgccgcagacgacgacgcggccgccgtgttcgccgccgcggccgagggggccgaagcgggcgcgcgggcgtcagagggcttcgcctcgaagttcgaccgcgcgcgcagttacggcgacgccaccatcggcacgcccgacgcgggagccgtgtcgacctcgctgttcttgcgcgggcttgcaacgggagccgcgcatcattaggcaatcgggcctgccgcgtcgtgcggcaggcctttcttttccggctgtcaaacgactgaggaggagcaccatgcagatgaagaagttcatcaacgatcccgagaacctcaccgccgagctgttggagggcctggccctggccaatcccgacatcctcgagctgggcgaggacaacatggtgatcaacaagaagctggccgaggccgatcgcgtcaccatcgtcacgcagggcggcagcggccacgagccggccatcgagggcttcgtgggcgagggcatggtggacatcgacgtggtgggcgacatcttcgccgcgcccggtccgcaggcctgcgtcgacgccatcaagctggccgacaagggcaagggcgtgctctacatcgtgctcaaccacgccggcgacatgctgacgggcaacatgaccatgaagcagtgcaagaagcagggcctcaacgtagtcaaggtggtcacgcaggaggacgtgtcgaacgctccgcgcgagaacgccgacgaccgccgcggcctggtgggctgcatccccacgtacaagatcgccggcgcagcggccgccgagggcagaagcctcgaagaggtcgccgccgtcgcgcagcgcttcgccgacaacatggcgaccctggccgtggccgtgcgcggcgccacgcacccgcagacgggcacgcttctggccgagctcggtgacgacgagatggaaatcggcatggggcagcacggcgaggagggcggcggccgccagcccatgaagtccgccgacgagacggccgccatcatggtgaacgctctggcgaaggacatcggcattcagccgggcgagaaggtcatgctcatcgtgaacggctcgggcgccaccacgctcatggagcagctcatcgtgtaccgagccgcggtcaaggagctggcgaagcaggacatcgaagtggtcgcgaacttcgtcggcgagatgctgaccgtgcaggagcaggccggtttccagatgttcatggtgcgcatggacgacgagctgctgcgtctgtggaacgcgccctgcaacacgccgtacctgaagaagtaggaggagggtcatgctcgcttccctgagctccgtcctcgcctgggcggaagagaacggctgcgcggcggcggccttcgacacgccgaacctggagcttctgctcgcagccatcggcgcggccgagcatcgcgacgagcccgtcatcatccagcacgcccagctgcacgaggaggagacgtccatcgacgtgatcggccccatcatggtggcgcgcgccgaggcttcgcgcgtgcccgtgtgcgtgatgctcgaccacggcgaggatatgaactacgtgcgccgcgcgctcgacctggggttctcggccgtcatgatcgacggctcgcagctgccctacgaggagaacgtggcgctgacgctgggcgccgtggagctggcgcgcgagtacggagccgacgtggaggcggagatcggcttcacgacgggccacgaggggctggagatgtccgatgacgatcgggagaacgtctacaccgaccccgacgaggcggcgcgcttcgtggccgacacgggcatcgacgcgctcgcggcgtccgtgggcacggtgcacggcttctaccaagcccagcccaagctcgacttcaagctgatcgaggagctgcgcatccgctgcggcgtgccgctcgtcatgcacgggggcagcggcctgtcgcgcgaggacacgcgtgcggccatccgcgccggcatccgcaagatcaactactttagctacatgagcaacgcgggcgtgcgcgccgtcgaggcgctcatcgccgagaagcacccgaagtacttccacgccctggccaacgccgccaccgccgccatgcaggccgacgcggaagccgccatggacatgttcagtatggttccgtcggcctgacggccgtcggaaccagccgacgctgcggctggctgtggcacccgatcttcgcgtgatcccggagactcgcgtaccaaagtacgcttcgcctctgcgatcccacgaatctcgggcaccgcagccagcctcgctgacttactacgccaacctggagacgagaggagatcggtatgaccgcaacctatatgcacatcggcatccccatcacggagaagaagccgaacatgatctacaacgaggccatgaagttctgggtgtcgaacgtcgacgactacgactacaaggtggagtacctcaagttcgaggagggcacgcccttccccgaagagctgcatcgtcgctggcacgtggcctacgcggtggacgatctggaccggtacgtcgacgatgccgaccgcgtcatctgcgaccccatggacgcgggtcccggtgtgcgtctggccttcgtcgagaaggacggcgccgtgatcgagctctacgaggacaagaactagcgattggcggttgagcgcggccccgaagacggggccgccgcttttccggatcggcttgacggcgaaacccccgatccgcggcaggaatcgatcggtttggtaatcccgcagattcgctttgttttacgctttgaacatgcgacctggaaaaacgccttcgatcacgctcggcagacccgaaacgccgcggccggatcctctccaagattaccaaaccggtcgattattgccgttcgacgacgttcccgcttcctggctgattcttactcggccttttcgacctggcggatcagctggacgcgctcgggggtgatggtggggatgcgcacgaacatgagatacagcaaaaacgcgctgacgcatccgaggatagcccagacgaggggcttctgcacgaaccaggcggacaggcccatgagcgtgaacgacacggccaggatgcgcaccttcgtgccgagcgggatgcctccggcttctttgaacgcggcgacgtaggtgcggtacacccgggtcgagatgatccaggcgtggcagcgcggcgaggatttcgcgaacaggaacgtcgcgagcagcagcagcggggtggtgggcagcacgggcacgaacacgccgatgcagccgatgatgcaggccgtccaagcgccggcgagcatgaggtaacgaacgatgcgattcatgacgtcctttccgtcgcgtaaggcggtacaggctgcagccagtataccgaagaggctcgcatcgcgatcgtgcgatcgtcggaacatgggaaattaacgggttttgcccaccttgctgaagatgcggatccaaaacccggacgaaaaaccctcatgattttcttgcatcttaaaaatcccgtgctacaataagcaagttgtttgttcaagcgaggggagaccctccacctggttcggcgctttggctgctgatgggtcgctcgaataccggctacaaagcctgaatacgaatgcgaaacccgtatgctcccaaagctacgggtttttattatggcgcggaagcgcgatggattgggaggtgagcgcgatagctgctcaggagcctcggctcaacgaagagatcacggttcgcgaatgccgtttgatcggcttcgatggcgaacagatgggtatttacgtgacggcggaagcccagcgggtggccgacaaccaggggctcgacctcgtggaaatcgcgccgaacgcggaaccgcccgtgtgccgcatcatggattacggcaagttcaagtacgaccaggccatcaaggccaagcaggctcgcaagaaccagagcaaggtcgaaacgaaggaaatgaagttccggccgaagatcgacgtgggcgactacacgacgaagaagaagcacgtcatgcgcttcctcgaagccggcaacaaggtgaagatcaccatcatgttccgcggtcgcgaaatggcgcacccggagctgggtctcaccatcctggagcgtctggccgacgacctgaaggacgaagcggtcatcgagaaccagcccaagatggaaggccgcaacatgcacatgctcatcgccccgctgcctgcggcagtcgcggcgaagaaaaagaaagagaacgagaagaaagaagaagggaacgaccatgcctaagatgaagactcatcgcggcaccgcgaagcgattccgcgttaccggttccggcaagatcatgcgctcgaaggcgttcaagagccacatcatgacgaagaagagccagaagcgcaagcgcaacttccgccatgaaaccgaagtggccacggctgaccagaaggtcatcgcccgtaacctcggcctccgctaatcgaaaaggaacagtgatagaacatgcctcgtgtcaagcgcgcagtcagcgcccataagaagcgtcgtaccgtcctcaatcgcgccaagggctactacggtgcgaagtcccgttcttaccgtgccgcgaaggagcaggtgcagcattcgctccagtacatgtaccgcgaccgccgcaacaagaagcgcgagatccgccgtctgtggatcacccgcatcaacgcggccgcccgcatcaacggtatgagctactcggtgctcatgaacggcctcaagaaggcaggcgtgcagctggaccgcaaggtgctgtccgacatggccatcaacgatcccgcggcgttcaccgccatcaccgaggtcgccaagaaggctctgtaggcttcgcgtctatgcaaaaacagcgccccgtcggataagccggcggggcgctttcgttaggggaggattttcctgccggctttcctgctacgactcgatggctccgaggacttcttcgtcgttatgccattcgtccgtgccgatgagagtgtgggcgagatacgcctcggctgcatctcgggcgcttcctgcttggttggacactacttcgatatcggctgcttgcagcgcttccacggcgtcgcgctcgatgatgccggtgatgaccgccgtcacatcgagctcgcgcagcaccgcggcgatgcgggcaggggtctgatgagggttcggcatgttctggcactcgacgatgatgccccgttcgatcctatagcaggtgaagcttgcgcaatgtccgaaatagggagatacggccagtccttcgctcgccaccgctattctcatgtgattcctttcgtcgcttcgtggaaataacgataccgcgcttggccgattgtgtatccgctctttcgctcaacggggataaatagtaagctgaacgacatggataccgaacctctgcagagcatcgacgttgcgatcgtgggagccggcgttgccggcgcgacgacggcgcgtgcattggcgcgctggcgtctgaacgtcgtggtgcttgaggcaggcaacgatgtggcctgcggcgcgacgcgagcgaactctggcatcgtgcatgccggctacgaccctttgcctggaacgctcaaggctcgcttcaacgcggccgggtccaagctgtttccgcaatgggccgacgagctgggattctcctacgtccgcaacggctcgctcgtgctcgcgttctccgatgaggagctggccagcatacggcgcctcgtggcgcgcgcggcggagaacggcgtggaaggcgtgcgcgagctggacgccgccgaagtgcgcgcgctcgaaccgcatgcgagcccgcacgtgcgcggcggcctgctggccgagacgggcgccatttgcgacccgtacgaggttgccctgttctcggcagagcaggcggcgctgcacggcacggcgttccgcttcaacgagcgcgtcgtgtccgtcgagcgcctggccgcgggctcgccctcgtccgcgcgctatctgctgtccacctcgacaggcgcgcggtacgcggcgcgcgcggtggtgaacgccgccggcgtgttcgccgacgagctgaacaatgccgtgagcgcgcatcgcctgcgcatcgcggcgcggcgcggcgagtactgcctgtacgattccgagtacggcccgctgttctcgcataccgtgtttcaggcgccgtcgtcagcgggcaagggcgtgctcgtgacgcccaccgtgcacggcaacctgctggtggggccgaacgccgtggagcaggcgagcaagaccgacctgtccacgagcgcggaggggctgcgcttcgtgctggacgccgcgaagaagacgtggcccgacgccggcgcgcgcggcatgatcgcgaacttcgcagggctgcgcgcctcgaacgccgacggcgacgacttcgtcatcggcgaaccggacgacgcgcccgggttcttcaacatcgcctgcttcgactcgccggggctcacctcggctccggccgtagccgagcacgtggcgcaggcggtggcggaacagctgggcgcggaggcgaacggggaattccaggcgagtcgcgagcgctgcaagccgttcgccgagcgcgacgaggccgagcgtgcgcgcgccatcgaggccgacccgcggtgggggcacatcgtgtgccgctgctgcgaggtgaccgaggccgagatcgtggccgcgctgcacgctccgctgcccgtgctgtcgctcgacgcgctgaagtggcgcacgcgcgcgatgatggggcgctgccacggcgggttctgctcgccggagatcgcgcgcatcgtggcgcgcgagacgggcgtggcgcccgacgtgctggacaagcgcctgccgggatcgcccgtggtggccgcttcgcgccccgattacgcggagctggcgcgcaagggcgagcggtcggaggcgcaggacgcggagcgcgagcgcgcgcatgtctacgacgtggcggtggcgggcggcggggcagccggcatcgccgcagcccaggcggccgcgcagcagggcgcgcgcgtgcttttgctcgaccgcgaggagaagctgggcggcatcctcaagcagtgcgtgcacaacgggttcgggctgcaccgcttcggcgtggagctgacgggtcccgagtacgcgcagcgcgagatcgacgcgcttgcggacgcgggctcggtggacgtgctggcgggtgccagcgtgacgtccgtcgatccggggcgcccggacgacggagcgccgctcacggtgcacgcggtggacgcgcgcggcgcgcatgccatcgcggcgcgcgccgtggtgctggccaccggctcgcgcgagcgcgggctgggcgcgctcaacctggcgggctcgcgtccgtcgggcgtgttctcggcgggcagcgcgcagaacttcatgaacctccaagggtgcctgcccggacgtcgcgcggtgatcctcgggtcgggagacatcgggctgatcatggcgcgccgtttggcgtcgcagggggccgaggtggtgggcgtgcacgagctgatgccgcatccgtccggtctgcgtcgcaacgtggtgcagtgcctggacgacttcggcatcccgctgcacctcagctccacggtgacgcggctggaaggggagggtcgcctgagcgcggtgtacgtgtcgcaggtggatcccgagacgatccaggtgatccccggcaccgagcagcgcatcgcgtgcgacacgctgctgctgtcggtgggcctcgtgcccgagaacgaggtggcgaagtcggccggggtggggctcgatcccgtcaccggcggagcgcgggtggacaaccgtttggctaccgacgttcccggcgtgttcgcctgcggcaacgcgctgcacgtgcacgatctggtggaccatgcgtcgcaagagggcgagcgcgcgggcgccgccgcggccgcttatgcgcggcaggcggcctcgggcgcctcggccgcgcgcgatgcgcatgtcgccgttcccgtgatggcgggcgaggacgtgcgctacgtggtgccgcagagcatcgacgccgccacgccgcccgacgagaagctcatgctgtcgctgcgcgtcgcgcgcacggtgaacgagccgcgcttcgtggtggaggggatcgacgaagccggccgggtgcgcgagctgaagcgcgcgaagacgatgatcgccgtgcccgccgagatggtgctcgtcgtcctgcccgcgggcgccgcggcggggtgctcggccgtgcgcgtgcgcgtcgagggccgcgacgaggccgcgcgcgtggccgacgagaccggcatggccggaggaggcgccgactgatgcagttcgctaccgacatcgccgcctacacgtgcatctgctgcccgctgggctgccgtatagaggtcgcgctcgacgagaacgggcaggtgagcgaggtttccggctatacctgcaagcgcggggccgactacgcggcgcaggaggccgtcgcccccgagcgcatggtgaccgccgtgctgtgcgtgtccggctgcctggagccggtcagcgtgaagacgcagcgtcccgtgccgaaagccgctatgaaggacgtgctggccgccgtcgccgcgctgcggctcgacgcgccggtcgcggccggagacgtgctgatcgaggacgtatgcggcaccggcgtggccgtcgtcgccacgaaaagcgtatgctgagcgaacgcgacccccgtcgggccgttgtcgatgggaagggcttccgatatgaacgatgaatccgagcggatcgagcaaggatcccatccggagcgcgaggagggaaacggcgcccgcacggccgctacggctctggtcgccttcggcacgctcgtgctgctgttcgccgcggccgtggtggtgttcctgctgatcgcggagttgacgcgcggccaatggatgctggccggcagcgccgtcgtcgtgctggcgttcctgctgtggctgggcaaccgcctcgtccacgtggccgccaaccagaacaagaaccccttgggctaagaggttgccgcgcgcgggtgtcggcctcgacgaggcggcgctgaggttgcagccggcgttcggcggcgcggactcagcggcgagcacggtttcacgaacccatatgcggcaaaatcggggttttggcagttttcgcgcccttcgccgaacagcttccaagcaaacccccagttcacggtttgccgaaacgggaacatggtcgtcatgggcacctcgagactgccaaacccccggttttgccgcacgttggacccgaagttcgcgctgccgggtcttctcgcatgccttacaacgcagaaggagtaatgcggcgggcggcgggaaccggggatgcttcgcttcccgccgtccatgacgtctatttgcgcttgccgcctctgctgcgctgctgggcgaggctggcgcgatgagcgcggcccggacggagatcgggaccgcccttcttcgccgaagactgcgcggggcgcgcgcctccggacgcgggcttgccgctgcgctggccgggctgcccttgcttcgcgttcgcccggcccggctgctggcggttcggctgggcgcccttcgacgcgacgggcttcttcggcgccttgcgcttcggggcgtttttcggcgcgtcttcggcctgcgcctgctcgcgggccttggccttcttgcgctcgcgcgcggccatctccttggcggcctgcttgatctcggggtcgcggcgcgcgtcggcgcgggcggccttgcccgcggcctcttcggcggcctgctcggcatcgaacgaaggcacctccatctcgggaatggggcgcttgatgagcttctcgatgtcgcgaagcgcgtcggccgtctcggggcttacgaacgacacggcgaagcccgcggcgcccgctcgacccgtgcggccgatgcggtggacgtaatcctcgggctgggtgggcaggtcatagttcacgacgtagtccacttcctccacgtcgatgccgcgcgccagcacgtcggttgccacgagcacgcccgtcttgccggcggcgaagttgtcgagcgcgcggcggcgctgcgcctggctgcggtcggagtggatagcctcggcggtgtagcccgcgcgcttgaggcggcggcacgtggaatcggcgcggctgcgcgtgcgggcgaacacgatgacgcggtcggagcccttctcggccagcacggccttgagcagcgccggcttgagggtctgcgccacgtggacgatgtactgctctacggtgtcggccgtctcgcccttgtgggcgatctcgacgaacgccgggtcgtgcagcagcttgcccacgctgttcttgatggacgcgtcgatggtggccgagaacagcagcgtctggcgcgaggcgggcgtggcgccgatgatcttcttcatggccggccagaagcccatgtccagcatgcggtcggcctcgtccagcacgagcacctccacgtcgccgaggcgcacggcgccctgttccatgaggtcgaccaggcggcccggcgtggcgatgaggatgtccacgccgtgcttgagcttgttgatctgcggggtgtaggacaggccgcccaccacggtgaggatgcggtgatgcgtggaggcggcgatggcggtgcacacctcgccgatctgctgggccagctcgcgcgtgggggtgaccacgagcatgagcgggccctgcccgcccttggcatggcccaggcggtcgagcgagggcagcgagaaggccgcggtcttgccggtgccggtcttggcggcggcgatgaggtcgcgcccttcgagcgcgagagggatggcctgctcctggacgggcgtgggcgcttcgtagcccaggcgcgcgacggcttcaagagcctggtcggacaggccgagttcgttgaattgcttcatttgtctctgttttctgtgtcggtgcggcacgggtgccgctgattgcaggtgcggggtcgatccgccgcgtcatgcatttcggaagatcgaggcgcaaccgagcgaacgtcgggcgccgaacaaccagtatacgctcatcggtcgacctccggtccgatgagcgcataatgcacaaacctggtaccaagccgacgcgaaaccccgtctgcgcccttagcggatgtgggcgggcttctttccccagtagaagtgcagcaggtgcttgcggtagcgcgggtcgtcggggttcttcggcgcggctatcaggcgcagcgtggcgttcgcgatgtcctcggcggcgttcgggtggcgcaggaagctgccgttgatcagcatggcgtgggcgctttcggggttgcgcgccacgtggcgcagcgtgtccagcagctcgcgcgccgtggtcacgtgcatggcggcgcccagcgaggtgagcatctgcacgttcaccttctcctggccgtacgctttgcccagaaggatcatcgggacctgcgcgcacaggcactcggtaaccgtgaggcctcccgacttgcagatgaccaggtcgctggccgccatgagcgcagccatgtcgtccacgtagtcgagtacggtggcgttggagagccccagatcgtcgcattcctggcgcaggtggcgcgcgtagtcggcgtcgcttccggccacgaacacgaagtgcagcgtgtcgtcgaagccgtgcaggtagggcagcagcttgtccagcgcggtgcggaagtgcacgtaggggcggggcaggtacgcgcccgccaaggccagcacgatgcgcctatcctggggcagctccaactgctcgcgcacggaggggcggtcgtaggcgcggcggaaatcgtcgcgcgtggggatgccggtgatgaggatgctctcctcgggcaccttgcgcgggcgcagcgtctcggccatcgactcgttcgcgacgcagaacagatcggcggccttgtgcggccagaggccctcggtctcgtagtcggtgggaacgcacacgatggggtagtgctggccggtcagcatgcgcgccgccacggccacgttggcggcggtgatgtgcgtgcacacgatggccagcggctgcctgtcgcgcacgtagtcggtgaacttcgagtacatgaggtgcgaccagatggagccgccgccccacagaagccgtccggtgagcgtgaagcgccaggtgaggtcgtagatgggacgcgtggcgcccgtgaacagcgacgcagcgttgtttccgtcgaacacgatgcggccgtaatccagcacgtcgatcacctcgatgtcgaggtcgtcggggatgggaggctggccgtccgtccgctcgccgtccgcgtcgcgcatgagctcgaacgcctgcgcgacggcgtaggcagcgctgcggtggccggagcccaccgatgcgtgcatcacgatgaccaggggcttcttcagctcgtcttcgggaggcgcgagcgcgccgtcgtcggcgtccgccagctcgatagaggcgggttcgttttccggcgcgagcgggcgcgcagtgttctcgtcggtgtccatgtcataatcataccgcaaacgggcggcgttcggtgcgagcgtgcggggcgcccatcgcatcgccgcatctgggagcggctcgacggcgatgcgcgggagcgggttgatccggcaggctctccggcgtccgacgttcgccggctcgcccacgcggcggcgggtccgatgaagcgcgaacatgtcgattgcggcacatgttggcacacgaaagacgcaggcaaagaaaaaggccggaagcgatgagcttccggcctggcatttcgtggtgcccccaacgggaatcgaacccgtgtctcagccttgaaagggccgcgtcctgacctctagactatggggacggcttgcgcgattcctagctggaaaagcagcctgaacattattacaaagcgagcgcgtcattgcaagcgtttttttcgaaagcgagcggacgcgccttgcggcagcaggttgggcagctgcgataccgccacgcccagcatgatgacggctattccggccgtctgaagcgcgtccacgggttcggacaggacgagcaccgatatcgctattccgcatggcagctccgacgatgccatgatggtggacagccccgccgagaggtgcggcgttccgatgccgaacagcaccacgggcacgaacagcccgaatacgcccaggatcagcccgtacttccaaatgccggcctgcagcgcgccgcttgagaagtagtcggggcacacggcgaagccgaggatgcacgcgcccaggcacacgacgagtccgcgctcgattggcggcaggtcgcagccgacgcgcgccgacaggaacatgaacgtcgcgcagctgacggccgacagcagcgcgcagaggatgccgagcgggtcgagatgacccaccgtgttcgagaacaggccgctcgccaagagggtgcctccgaggatgacggccgccgcgacgatttcagcgaggcggggtttgcgacgggtggcgaccacctggaatacgatgccgatccaggtgaattggaacagcagcgtgatggccacggacacgggcagcatggtgagcgcgaagttgtacagcacgcaggtggtgcatgtggcgaggcccagccccagcaaggacagcacgcgcttgggcgacagcggtacagggcgcttgccgaggacggtcagcgcggccaaggcgacggcgaacagcagcgcgccgaagaacgcctggctggcggcggtttgggtccacgagaacccctcggcgagcgcgcatttgatcgtggcggccatcacgccgtagctggcgccgccgaggaacacgacggcggagtatttcaaggtgttcttctgcatggcggccattgtagcgcacgcccgcgcggcgggcgagtacaataggcggcatgccttttcaacatcacatactcgaccatgcgggcgacgtgctggacgccgcccgcgcatatctggaatcgtggctggcggcgggtctcgcgcccgtgctgctggttcccagtcccgccgctgccgaccgcgtgcgccgcgcgctcgcggaggggccgtgcgcgctgggagcgcgcgtggagacgcctatgacgtgggtgcgcgacaggtgggatctgttcggcgacgggcgccgcatcgtgtcgtcgttcgatcgcgcattgctcgtgcgccgcgcctgcttggagaccgaacggacggcgcttgaagccacgccgggcgtcgtcgacctgctcgcgcgcttggcgcgcgaggcgttgccgcatctgacggcgccggtcgccgcaaacgccggtctgagcgcggccgagcgcgatgcgctcatggtgctcgagcgttacgcggagcttctgcaggaggcggggtgctgcgaatcgtcgcaggcggcggctctgcttcccgaggctatggaggcgcccgcgccccttgtgctggccgggttcgacgaccttgactgcgctgaggagcggatgacggccgcgctcgcgcagcggactgacgtcgttcgcctcgatgacggctgccgcgccccgtcgggtgccgacgggcgcgcctccgagctgcaagggctgttggagcgtctgttcaagcccgcgatgcccgagcctctgcacccgacggggcgggtgcgcttctcgcttccggcgggacgctacgccgcgccgaccctcgtggcgagcacggtggcgcaggccgtggccgacgagcgcctccgcgcggtcgaggaggggcgcgatccgctgcccgttgcggtgactgcccgcgatcctcgcgcgttgttcgacgacgttgcgggcgcgctgctcgaagcgggcgccgcctcggccgtgagtgcgagccgggcgttcgccgacaccgcgttcggacgcgcgtttctcgctctgcacgcgttcgcctgcggcgcatggagcatcgcgcaggcgtccgacttcgcgctcggaccgttctcgggcatcgggatccgaacggcctgcgagctggatgccgcgtggcgcggggagcgcacggtcgagcgcgcgcgcatcgcggccgatctcgcccgcgaaagcgaggcggcggccgacgcgctgggagcgctcgaggcgggcgacgcggacggcgcgctcgcggggttcgaggcgcgtctgcgcgcacgtacggacctcgatccggcgtttcgcgcggagcaactggcggccgtgtcgtgcgcgcgtaggttcgcggcggcatgcagtcgcgcgaacgcggcgttcgacggcgcattgccgttgctggagcgcatgccggtttcctcaagcgctcggtcggcgcgcgacgaaggcgcgcgccccgacgcgctgttcatgtcgctcgacgaggcggccgagcttcccgcgtgctcttgcgccgcgctcgtgctgtgcgatctcgacgcgggctcctacccggtgcggctcgtcgaggatggcggcacgctgctgctggagaagctgggccttggccgccccgcagacgcgctcgccgcctcccgccgccgattcttccgcgcgctttcgagcgcctgcgagacggtggtgtgcgagcgcgtgctgaacaccgaggatgcgaacgaggcgtatccgtcggtcatgttcgaggagctgctcgactgctaccgggaagcggatgcgggcgaggacgaccgggcgacggggcttcccaagccgctcgtcgccttcgccatgctggcaggggaggacgcgctccacgacaacctcgcgctcgtctgcgagggtgtgcagccgcgcgtaggcgaaggcggggcgacgctgtcctgggagctgccggccgcgggcgcggtgtcgcccgagcagcgcccgcgcatcgtgctgccgcgctcgccgcgcgaggggctgcgcggcgccgacgccgcgttggcgctgtcgccgtctgcgctggaaagctacctcgaatgtccctacaagtggttcgctctgcgccgtcttcgcctgtcggagccggacgccgggttcgggcctctcgagatgggcagcttctcccacaacgtgctgcgcagcttctacgagcatttccgcgaggcggggcatgcgaaggtggactccgcgacgcttcccgaagcgcgcgcgcttctaggcgagacgttcgaccgccatctggaatcgcaacgcaacctcaagcgctcggtcaacccgttgatcccgcgcaccgccttcgaacgcgccgagacggccgatctgaggaagaggctcgtccggttcctcgaccgcgaggcgctgctgctgccgggcttcgagcccgtgcgcttcgagttcgatttcggctcgagcgagccgttcccgtacgcaggatgcctgctgcgcggcagcgtggaccgcatcgacgtgaacggggccggccaggcggtggttatcgactacaaggggtcgctcaatggcgactacgcgctggattcggcatcgcccgccgcgcaggcgggcggcgcggtgcttccccataaggtgcagacgcttatgtacgctcaggtggcgcgcaaggtgctgggtctcgacgtggtgggtgcgctgtacgtgtcgtacggccgcgatcggcgcgtgtcgggcgccttcgaccgcacggtcgtgggcgagcgagacgtgcccggcatcgacgtcgagcgctgcggcgtgccgggaccggcgggcgaggcgctgggcgtctcgtcgttcggcgagctggtggacgcggtggaggatcgcatcgcccaggccgtgagcacgctggccgacggctgcatcggtcccgatccgcgcggaggagacccgtgcgggtattgccccgtgctcgcctgcgagaaaaggatgggcgcatgaacctctcaacctgcacccctggtcaacgccagagcatcgagcacgtgagcggtcccttgctcgtgtcggccggcgccggctcgggcaagacgttcacgctcacgcagcgcatcgcctatgcgcttctgcccgagagcggccctgcggcgtccggcgtcgacgaggtgctggccatcacgttcaccgagaaggccgccgccgagatcaaggcgcgcgtcaagcgcacgctgcgcgccgaagggttggccgaggaagcgctgcgtgtggacggcgcctggatatccaccatccacggcatgtgcgcgcgcatcctgcgcgcccacgcgctcgacctggggctggatcctgcgttcggcatcatgggcgatgcggagcgggccgaagccgtggccgacgccatcgacggcgcgctgggcgacgacaacgacatcatcgcgcgcggctcgtacgcggcgctgttcgacgagtacccggcgcgctcgacgatgccgctcgctccgtcggtggcctccatgctgcaggctctgatggacaaggcggcggggctgcgcggcggcctcgacgcgctcgatttcgggccgtcgcccgcgcaggcctcgacgctcgcgcgcgagctgctgctggcctacgagggcgtgctgcccacgctcgagcgggcggggaagagcgcgtccgccgaacgggcgcgcgcggccgcggccgacgcggtggaggcgctcggggcgtttttggccgacgcgtccgcggcgagcgacgcgcgtgcgctggcagctgtggtcgacggctgcgcctacctgccgtgcacgttcggcggcgccgatgtgaaggccgaggtcaaagcgtatcaagctgtgcacgcgcgcgtggctcagaatgtcgcgctcgcgctggcgcacccgctggcctccgagctcatggcgctcgcgcgcgaggtgaccgcgcgcttcgaggatgcgaagcgcgccgcgtgcaagctggacaacgacgatctgctcgtgcgcacgctcgacgcgttcgaacgctgcccggacatcgccgcgcgctacgaacgccgcttcaaactggtgatggtggacgagttccaggacaccagccagctgcagatcgacatgatcgcgcgcctggccgggccgcggtgcgcgcacctgtgcacggtaggcgacgcgcagcagtccatctaccgcttccgcggcgccgacgtgaacgtgtacgaggctcataagaaggcgatgcgcgccgacgaagtgggcgcgctctacgtcgagctcgcgaagaacttccgcagccacggcgacgtgctgtcgttcgtcgaccgcgtgttcgagcagccgacggtgttcggcgaggcgttcatgtcgctggagccgaacgagcagcgcccctcctgctatcggggcagcgcgccgcgcatcgacctcgtgctgtcggtgcagcccgcggggcgcggcaccggcgtgcgcacggccgatgcgaagcgcgccggcgccgaggccatcgcccgccggttcgccgtgctgcgcgaggacggccacgctcccggcgacatggtggtgctgctgggcaagatgagccgtgcgggcatgtatgccgaggcgctgcgcgccgagggcttcgagtgcgtggtgacgggcgggtcgctgttcgcgtccgcgcccgaggtgcgcgtggtcgcccgcttcgtggaggcgctggcgaacccggcgaacacggctgcgctgttcgaagtgctgaccagcgatatgatgcgtctgtcggcagacgacttcctcgtgctgaccaccgaggaggatcctgagacgggatgcgtgcggcggcgcgatctcgaccggggcttcgcgcgcctcgcatcgcgcgccgacggactgccgccgcggctggcgcacgccgtgcgcctgttcgagcgggcgcgtgacgagtcgcgcacgcgcccggtggcgaccgtggtgcgcgatgccgtggtgcgttcggggtggatggcgcggctcgaggaggaaggcgcggcgggcacggcgcgagccgcgaacgtgctgaaggccgtccggctcgtcgatcgcctcgaaaccgagcgccacctggggctggcctccacggcgcgcgcgctggccgacgagttggccgtaggattgaaggaggcgcccggcgcgttgtcgggagccggcggcgacgtggtgaagatcatgaccatccatgcttcgaaggggctggagttccccgtcgtggcgctggccgacttcgccgacgcgcgcgcgggaagcggcgagcttctggtggagacgtgcggttccgtcgcgcgcgcctcgttggcgcccgcagcgtcgttggaggcgtttccccagctggcgaagcgctcgggcgcggctgcggccggcgacggcgaggatgatgccgatctgctggccgctcgccgtctcgtagaaggggaggatgggcccgcgtgcgctctcggcgcttcgtcgtgcacgcaggcggcctaccgcgcccagctcgcgcgccgtgcggccgacgaggagctggccgaagcgcgtcgcaagctctacgtgggcctcacgcgtgccagcgaagcgcttgtggtggcgatggacgcgaaagctccctcggcgggcaagcctccggcgtacgccccgctcgtcgacgatatccgcagcgcgctgtgcggcgacggcgattttcccgagggcgttgccgagcttccctacggcggcaccgcgccggcccgcttcgagcgcatcctcgtgcagccgccggagccgcgcgccgaggagggtgtcgagcctgcgcccgaaccgcggctgttcttcgtgcccgtcgtggacgacgcttcgcggtcgacgctcttcgcgggaggttcggcgcgcgacgatgcgttctcgtactcgtcgatcgccccgaacccggttccggctccggcgggcgagggcgcgcctttcgccgcggacgcggacaaggcgacggatctgggcagcgccttccatcgggctgcgcagctggccgtcgagacgggaagggttcccgacgctgcgcgcctcggcgtgctctccgaggcgtacgctctatcgacgggacagcgcgcgcggctggccgatgcctgcgagcgctggttctccagcgcgacgtacgccgaaacgctgcagtgggggctgcggcgcgccgaggtgccgttcttcgtgccgatatccgatgcgttcgtggaaggggagatcgatcttctctgcaccgacgacgcgcagcttgcgggcgctcgtgcgctcgtggtggactataagaccggcggttcggacggcgaggcgccggaagcgctgtgctccaagcacctcctgcaggcgcaatgctacgcctatgcactgctgcggcagggctgcgtcgaggtggagctgcgcttcgcgcgcgtcgagcgcgaggattcggcgggggacatgcaaaccgtgacctaccgcttcactgccgaagatctcgacgggctggccgtccgcatcctaagcgcccgaagggcgtagcgtttttcgctgcgggccacccgcttccgatgcgccttgacagcatgagtccatcgcgtagaatgtaatcgtccgattacattctacgcgaaataaaacaccccccccatcaggtataataaggaaagttcggccagaattattattctctcagcaaaaaggtcataaatcacgactgaacattgttcaaggcatttgctaggatgattgacgggcaggggcgcggtgtgatggagtgcgtagcgagtattgtcaacacccgcgcccctcgaggcgtttccggggcttacgccctgcgcctgccgtagcgctcgtaggcctgcgtcacctgcagctcgtactccttgcgagtgcccttgaccaccgtgtccaggatgaggccgctggcgaatgcgaggatgccgacgaacacgagggccacggccagcaatgcggagggcaggcgcggtacgaggcccgtcgcggcgaactcccagatgacggggatgccggcgatgaggcccaacaagcagaacagaagcgcgagccagctgaacagcgcgagcgggcgatagtccttgaacagcgacatgatcatggccagcaccttcatgccgtccgagaacgtgttgagcttgctctccgatccttcggggcggtcgcggtagtcgatcggcacctcggcgatgcgccagcgcttgtcgacggcatggatggaaagctccgtctcgatctcgaacccgggcgagagcaccggcatggtcttggcgaacacggcgttgaaggctcgatagccggtcatgacgtcggagaactcgaagccgtagatccatttgatgagcgtgcgcacgaggtcgttgccgaagccgtggaacgcgcggtcgttctcctcgccgtaggtgccgttggacaggcggtcgcccacgctcatgtcggcctcgtcggccatgagcggcgccaggagctccggcgcggcctcggcggggtacgtgtcgtcgccgtccaccatgacgtagtagtcggcgtcgatgtcgcgcagcatctggcgcaccacgttgcccttgccctggcggcgttcggcccgcaccacggcgccgtgctcggccgcgatggaagcggtgccgtcggaggagttgttgtcgtagacgtacacggtcgcttcgggcagcacgcgcctgaagtcgtcgaccaccttgccgatggttacggcctcgttgtagcaggggatgagcacggcgacggtgccgctctgggcgcgcggcgtatcgatcttctgatccacgaatcactcctcggttctgtataggtgaggttcatcctactcgaaacgtcgggcttgcgccagacggctccgttgttttccagatgaaacccggtaaggaagccgttttcgaccggtaatattgtgcccggcgcctcctgctacaatgaagaacgcccgctacgactggaagaggggcgtcctccctatggaactgattacccgctcgcgcgagcggcggcgcatcgccatcatcgtggtcgcgctcgtccttgcgcttctgatcgcgctcgcgtacacgatcgtctcgtcgcgtcaggcgacggcggccgcggtggaaaccatgagcgaagtgtacttgcaagagctcagcaaccaggtcatctcccatttcaacaccggcatcgacggcaagttctgccagctggaaaccgtgggcagctcgcttgagctgtacgacccggagaatctcgacgaggtgagggatttcctcgcctgcatggaggcggacgatgacgagtacgcctaccttgcgctgcgtggcagcgacgggctctactacacgtcgtggggctcggacgccgcctcggatgaggagcttgccgcccgcagcgagctggggctgtcgtatcgggacgcgcacggccacgacgtgatgctatacaacggaaccatcgcgctcgtggattccttcgagcccgttacctgcggaggcgtcacgttcaccgccgtcgtcgccgggttcggcgtcgacaccgtttccgggaagctcaacctcgatctggtcaatggcagcgcgcggtcgagcgtcatcggcttcgacggcacttgcatcgcaggatgcgatgccgaggggctgtgcaacggcgagaacctgttcgacgcgttggaatcgagcgctcgcctcgacaaggggtacagcatggaccaggtgcgagaagccgtggagaacggggagacgttcctgcttcccttctggtgcgggggccatcacgagtacctgtactttcggccgatgagcaatcaagactggtatctgtgtaccgccatgccctacggcgtggtggacgaggacgtggcgggactcagctgggtgctcatgcagaacgccgttctcatggcgaccatgatcatcgcggtcatagccatcttcttctcgatctactatcagctggtcaagcgcaacacgcgtctgctgtcggacgagaagaaccgcgccgagcgcgcttccgaggaagcgcggcgcgccagtttggcgaaaagcgagttcctctcgcgcatgtcgcacgagattcgtacgccgatgaacggcatcatgggcatgaccgccatcgcgctcgagaatgcgcacgacgaggagaaggcgcgagcctgcctcgagaagatcgacgtgacgtccgagcatctcatggcgctcatcaacgacatcctcgacatgagcaagatcgaaagcggcaagatcgacatcaagcgcgagacgttcgatttcgggacgttcgtagggtcgctcgacgacgtgttcggaacgcaggctctcgaacaggggattcgctacaagacggaagaagtgggcgcgctgccctcgctgctcgtcggcgacgggcttcggctgaaccagatcgtttacaatctcgttggcaacgctttcaagttcactcctcgcgacggcagcgtcacgctgcgcatagaggagcttcccgcgccgccggaagaggatgctgcgcacgacgacgcgatctggctgcgcttctcggtgaccgatacgggttgcggcatcaagccggagaaccgcgagcggatattctcgtctttcgagcagggcgacgagtcttcatgcagacgcggaggcacgggtctgggccttgccatcacgaagcggttcacggagatgatgggcggtcgtatatcgttgtcgagcgaggtggggaaggggtcgaccttcacggtggacgtgccgttcggacgagcctcgggcgaaggggccgccacgtgcgacgatgcgttcgccgcgcggtcccgaacgcacggcgacggagtttcgtacgatttctccggcaggcgcgtcatcgtcgccgaagacaacgagctcaaccgcgagatagccaccgaggtgctggccatggcgggtgccgaggtcctggcggcgtccacggacgccgaggccgtgcgcgcgttcgagcgctcgcacccgggctccgtcgacctgatcttcatggacatccagatgcccgagatggacggctacgaggcgacccgcgtcattcgctcgctcgaccgcgacgacgcgcgttcggtgcccatcgtcgcgatgacggccaacgcgttcgtcgaggacgaggagcgcagccgcatgagcggaatggatggccatctgagcaaaccccttgatatccatctcgtatatgccacaatggacaggtttttgagagggcgctcgcggggagggggcgcgtagagcgaaaggacgcgcgcggtgaagaagctcgttgctcagatcatgaagttcggcgtggtgggcgtcatcgctttcgtcatcgactacggcttacttgctctgctcaccgaggcgttcggcgtgaactacctcgtcagcgccaccatttcgttcacggcctcggtcgtgttcaactacgcggcgtcgatgcgctacgtgttcacccataaggagggcatgagccgccgccgcgagttcgccatcttcgtcgtgctgtcggttatcggcctgggcctcaacaacggctgcatgtgggcgggcgtggagtttctgggcatccactacctcatcgtgaagatcggcgccacgttcatcgtcatggtgtggaacttcgtgacgcgcaagatcttcctcgacgccggcgatgcgcccggcgagatcctctcggacatcgagtagccgtctcggccgaagctgccccgaacgagcgaagcctccacctgtcatcctgctcgcagcgcgccagcgcggagccgaaggaacccgcgcggcgttagccggggtgctccctgctggtgttagcgcgggatgacggcgaaaagggcgtgaccgggtaaaaacgaggcggtttggtaatcggttgcaactcgcgacgggatgccgaaaaaatcgacctgggctgatgtcgggcttccgcttcggcgcgccggcgaattgggaagcggaaaggttttggggttaccaaaccgccccgttttcgccatggcgcggcgatctcggcgtcatcgccgtctcagcgtcgaatcagacgatgcgccgacaataaaaaacgaggccgggaacggattccggcctcgtatcgtttacctggtgcccttgacaggattcgaacctgcggctttctgctccggaggcagacgctctatcccctgagctacaagggcacggtggaggagattatacgctatcatggacgaaacggaaaaacaaaaacgagatttgggcgtattcatggaagaaaccataacgattgagcgcatgggctacggcagcgaggcggtcggccgcctggagagcggcaaggccgtgttcgtggagggcggcgcgcccggcgacgtggccgcgctggagatcgtcgaggacaagccgacgttcgcccgcgcgcgcatcgcgcggctcgtcaagccctccgagctgcgcgtccgcccgcgctgcgaggcgggcgcggcctgcggaggatgcccctggcagcacctgtcctatgacgcgcagctggaggccaagcgcgccaacgtggcggcggcgctcgagcgcacggcgaagttcggccgcgagcgcgccgaggagctggtgcgcccctgtctgccgagcaagcgccagtggggctaccgcaacaagctggagctgggcgcggccatggacgagcgcggcacgttccaactggggttccaccgcgagggcgcgcacgacatcgcctcgccgggcgcctgccccctcgctcacgacgccatcgccaaggcgcccaaggcgctgcgcggcgcgctgcgcttcgcgcaagggtcggccgacctcggcatcttccgcgtgggcgtgcgccacagcctgcacacgggcgatctggaagtagccctgtggacgagtcccggctccttcccgcgcggacacatcgccaaaaccgtcaagagcgccgtcaaggccaccagcatcgtgcgcgtcatggccgaccccggcaaggcccgcaagatcaagggcgtcgagacgctcgacggcaagggatgctgggaggaacagctgggcgacgcccgctacctggccagcgcgccgtcgttcttccaggtgaacaccgcgcaggccgagaagctgatcgcctgcgtgatcgagggcttgggcggacgcatgggcgaggacgggcccgaagggctcgacgacctgctgatcgccgacctgtacgctggcggcggcacgttctcggtgccgctcgcgcaggcgggcgccgaggtgttggccgtggaggccgcgggctcgtcggtgcgcgacttgcgccgcaacgccgacatgaaccgcgtggatctcgaggtgatcggcggcgacgcggcgcgcgagcttccggagctgggcggcctcgacgcgctggtggtggatccgcctcgcgcgggcctggccgacggcgtggtggagagcatcgccgccgccgcgccggaacgcgtggcctacgtcagctgcaaccccgccacctgggcgcgcgatgtcgcgcgcttcgagagccaagggtatcgcctgactagcgtccagcccgtcgacatgttcccgcaaacctaccatgtcgaggtggtcagcgtcttcgaacgcctctagccccgctgtcgcccccgactcgtccctgaacgcacgaaccgctcgcgaaaggaaagcccatgatcctgtctgacaagaccatagagaagctcctcgccgaaggaagccttgccatcgagcccctcgagccggagcagatccagcccgccagcgtggacatccgcctgggcgacacgttcggcatcgtcgaggacacgccgagcggcatcgtggggctggaggacgagatcgcctacaagacgatccgcaccgaccgctacatcctgctgccgggccagttcgtgctggcaaccaccatggagtacgtgcgcctgggcgccgacctcaccgccttcgtggaagggcgcagctcgctggggcgcatggggctgttcgtgcagaacgccggttgggtggatccgggcttcgaaggcgagatcacgctggagctgttcaacgcgaaccgctgcgcgctggagctgcgctcgggcaggcgcgtggggcagctggtgttcgcccagctggacgaggcggcgaagaacccctacgccggcaagtaccagggccagcgcggcgctacgggctcgcgcgtgtacctcgatccggaggcagcgcgctagcgcaggcgcgccctgtcgatctccgcgcgcatcggcggttgccgtgccgatccgcccccgtttccgcagcgcttctgctcgccgtggatgttctacgatttttccggtctggcggacttgacctgctaaacttcaaccttgtatgcgatactttcgccccgtttcgcgtgggcgcatgatagcaagcaaacgaaaaggagccgacccatggcgcagtacactccggaataccagccgaccggcgacgaggtcgccgtcatcaccacgtcgaagggcaccgtccgcgtgcagctggcgggcaaggacgcccccatccacgtgggcaacttcgtcgagctggcgcgcaagggcttctacgacggcctgaagttccaccgccacgttcccggcttcgtgatccaaggcggctgcccgaacacgcgcgacctcacgcccgaagaggtcgtcaagaaggccggcaacccgttcgcgggcctcggcacgggcggcccgggctattccatcaaggaggagttctccacgaaccccaacaacaagcacctcgacggctcgctggccatggcgcgctcccaggatcccaactccgccggctcgcagttctacctgtgcctgggcgcccagcccatgctggactcgggctacacggtgttcggccagacgatcgacggcatggacgtcatcggccagctgcgcgtaggcgacgtgatcgagagcgtcgagatcgagaacgccgccgaatagcgatccgagacgccgaggcgattccgcgaagatacgaaggaagcagatgaacaacgacttattccagcaagcccgggcggcgtacgcgcgcaaggacttccaaggcgccctggctgcctacacgcagtgcttgcaggatgcgggcagctcgcttgcacccggcgaggtggggctgctgtaccaccagatcggcaactgcctggtcaagctcaagaacccgaacgaggccatccacgcctacacgcaggcgaccgccgatgcggcctacgacgcgtgcggcgcggtgaactacaacctcggcatggcctacgcctcgctgcatgattacgaggacgccgtcaagcacttcgagatcgccgtgtccgacgccaagtacgatgcgtcctacaaggcctactcgggcatgggcaacgcgctgttgaagctgggcaagtcggccgaggccggcgtggcgtttcgcgaggccgcgctcgacgaggccaaccccgatcccacgaaggcgctgctcaacctcggcgtgtgcttcatggcgctcgaccgtccggccgacgccgtggcctcctatgaaagcgcgctgcagttcgacatgcagcccgacacgcgcaacaagctgtacgcgaacctcggccaggcctacgtggccagcggccagatgcagaaggccgtgaacgccttcgacgagtccatcgccgacaagacgtacttcctcagcgactcggccagcgtcgactaccagcgcgcaatcgccgcggtcgcccagggcacgtccgagatcactcaggtgatggctccggtggcgcccgttgccgacatgtcggggctcgacgtggccgccgacggcacggccgtgtacgtggatcaggatccgtacgcggcgggcggccaggaaccgtactactacgccgatccgtacgcccaggccgagacgaacccctacggcgccccgggcgcggaggatcatttcttcaacgccagcgacgaagagctggagcagtggtcgaagggtctcgccaagcaggatcgcaagcgccgcaacgtgggtctcaagatcctcgtcaccatcatcctgatcgtgctggtcgctttcggcgccgccgtgttcctgtacacgcagggctggggctatccgtcgcaggaccaggtggtcgagcagctgttctcggatccgaaagcggccttcgccagcgaggtgaccgaggagaacgccgcgtccatgaccgagctcctctcgacggtgggcagccctgcgatcgacggcatggacaagtccatgagcgattccaccgtgtacgtgacggctaagacgcccgaaggcggcgacgtgcagtacaaggtatccctcgtgcgcaacatgatcgggtggaaggtgtcgaacgtggagctgtacttcccgagccagaactgacaaaagcggcatacgccgtttttgtcatcctgagcggagcgaccgaaggaagcgaagtcgaaggatcccgtgcggcgcaagccggaagccgtcggtcggcgccataggggatccttcgactgcggcggcttcgccgcctccgctcaggatgacaccctcgtataaagagagagaaagggcactacaacatggcacagcagaagacctacacgatgatcaagcccgacggcgtgcgcaacggccacatcggcgagatcgtcaaccgcttcgagcgcgcgggcctcaagatcgagcgcatggagctgggcatggtgaccgacgagcaggcgaaggccaactacgccgagcatgagggcaagccgttctacgacggcctcatttcctacatcaccagcggctcggtcgtgaagatggtcgtgtccggcgacggcgcggtggccaagtgccgctcccttatgggcgccactaatccggcagaagctgcccccggcacgattcgcggcgatttcggcctcatcatggacgagaatgtcatccatggctccgattccccggaatccgccgagcgcgagatcggcatcttcttcgcgtaaagcacgttccgagcgcgccgccgcgtacgagcctttcgctcgagcgacggcgcgctttttgtttttcggagcttcgcgcaccgaaggttgcgcgggataccagacgagaaaaggacgtgagcatgctctatcgagtcatcgacgctgctgaacttccctcgctcgtgtcggcgttcatggaaacctacgaagtggtggctccggtcaagcgcgaccagggctacgccttcgagaccatcgaatcgcccgacgacatcgagcttgcctatcctaccaccatggcttcgccgaagaagtacttcctgccgcccgaggagacgctcatgtccttcgacgcgcgcacgaacagcgtgaccgacttcgccgccgagatcacgccgcgcgtcatcttcggcgcgcatgcctgcgacatcaacgcggtgaaccggctcgacctcgtgttcaaggacggccgctatcccgacccctactacgtcgcccggcgcaacgccacgctcatcgtggggatcagctgcatgccctccgagacgtgcttctgccatttgtggggctccgacgaggcgcgtttcggctacgacctgtttttgcaggatatcggcggaaagtacctggtcagcatatccagcgtcgaggcggcgaacatcctcgaggcggcgtgcaacccgcgcgtggccaccgacgaggaccgtatcgagttccgccacgccacgcgtcggcgccaggaggcgttcaacgacgctattcccgacatccaggacgtggccatgctcatggacgcgttccataaggacccgttctgggaggagctgggcggacgctgcctgtcgtgcacggcgtgctcggcggtgtgccccacgtgcttctgcttcgacatccaggacacgttcgatccctccggcgaggcgggtcggcgcgagcgcgtgtgggacgcgtgcactgcgccgcagttcgcgcaggtggccggcggccacaacttccgcggcgacgggcgcaaccgcgtgcggcatcgcatgtaccacaagctcaacgggttcctcgcgaaccatgaccgcatgctgtgcgtggggtgcggtcgctgcgtgaaggcgtgcaaggcgaacatcaaccccatcgaggtgctcgagttcttcgagaggaaggggatgcaagatgcccagtagctgcgcggtgtccaccgtccaggtcaaaccgttcttcgacgaggcggctcccctgtcgggcgagcagatgatggcggcgaacccgtatcggccttggccggcgcggatcacgtccatcatcgacctcaccgagacggagaagctgttcgagttccgccttatcgacgagcgcatccgcgatgcgttctcgcacgagccgggccagttcgtcgaggtgtccatcttcggggtgggcgaggcgcctatctccatatccagctcgccgtccaagcgcggcttcatcgagctgtgcgtgcgtcgcaccggccacttcaccgaggtgctgcacaagatgcagtgcggcgacatcgtgggcctgcgcggcccgttcggccgaggcttcccgttcgaggacatgaaggggcacgacatcctgctggtggcgggcggcctcggcatcgctcctctgcgctcgctcatcaacaacatccacgacgagcgttccgagttcggcaaggtcaccatcatctacggttcgaagaacccctccgaggtgatgttccgccagcagttcgagatgtggcgccatcgcaaggacttcgacctgtacctgacggtggatcatcccgacgacacgtgggacggcgaggtcggcctggtcacaaagcctttcgagcatttggagatcgatgccgccaacacgttcggcgccctgtgcgggccgccggtgatgtataggttcgccatcgacgagatgcggaagaagggcatcagctacgaccatatctacgtgagcttcgagcgccatatgaagtgcggcatgggcaagtgcggccactgccagatcgggcatcagtacgtgtgcatcgacgggcccgtgttcaactattgggaagccaagaacatccaggggtcgatgtaggatggagaagcgcgacatgaacggaaactgcatagcctgccaggagaagccgtccgcgccgcgcgtggtggtcgtgggcctggccagctgcttcggctgccaactgcagatcacgaacgccgaggcgcacctgctggacgtgctcggtcagatcgatctgcgctattggcagctggcctcgagcgatcccatgcccgaggacttcgacgtggccatcatcgagggcgccgtcaccaccgaggaatccgaagcgacggtgcgcagcctgcgcgagaaggcgggcgcgatcatcgccgtgggcgcgtgcgccacgacggccggcattcccggcatggccgcagaggggttcctcgagcgtcctgggcaggtgtacgatcgggtgccgtcggcctgcggcgacatggtggcgccgcgcgcggtgggcgccgtcatcgacgtggacttcgaggtgcgtgcgtgccccatcgacagctacgacttcatcgacgtgctgcagcgcgcgctgtacggctcgaacaagacgtatccctcgcgcacgatgtgcggcgactgcaagcgcaacgagacgagctgcttcttcggaaaggggcagctgtgcctggggctcgtgaccacggccgggtgcggcgcgaagtgcgttaacctgggccgtccgtgcaacgggtgcagggggctgtcgcccgacgcgaacctggcgtcggcgcgcgaggcggtggcgcgctacggcgtgtcggtcgccgacttcgaccaggcgctcgagatgttcaaccagacgaaccccgcccttgcgggcagcgagtgaggacgcattctatgacgaaaacagcgattcacgtcgatcatatcgcccgcgtcgagggccacggcaacgtgcacgtggtcatcgaggacggggaagtgaaaaccgtcgagatgaacgtcgtcgagccggcccgcctgttcgagagcatggtgcgcggccgccgcttcgaggagatcccctacatctcttcgcgcatctgcggcatctgctcgtcgagccacgtggtgaccgacctcaaggccatcgagcgcgtgttcggcgtggaggtgaccgaccgcacgcgcgccctgcgcgagcttctggtgtacggctcctatttacagaaccatgcgtcgcatctgttcgtgttcgccgcacccgacttcctcggcatgcccagcgtgttcccgctggctcagaccgatcccgagctgttcgagcaggcgctgggcctcaaagcgctgggcaacgagctgtgcacgaaggtgggaggtcgcagcatccatcctatcaccgccgtggtggggggcttcacgcacgagatagagccggccgagtatctggagctggcagacaagatggatgcggcgatggacttcgcccttgaggcggtggatctgttccgcggcttcgaggtgcccgacatcgctacggccggcgacatgctggccatggtggaggacgactattacccggtggaatgctccgaccaagcgtttttcctgaacgcgggcatcgtcttcgatgcgaacgaggtgcaggagcatatcgaggagcatgcggtgccgcattcggcggctctgttggcgcgcgtgcgcgagacgcagagcccgtacttcaccggcgcgctggcccgcgtcaacgcatcgtggcagaacctggggcagaacgcgaaggtggccgccgcgaaggcgggcttgcgcccgcctgaggcgaacccgttcatgaacaacgtggcccaggccgtggagatcatggatgcgctcgaccgctgcgccgacctgtgccgcaagcttgccgagccgggcgccatcgccagctccagcctgcccgtgcccttcgaggtgaaggcggggcgcgccgtgggcttcaccgaggctccgcgcggcgcgctgttccacgacctcacgctggatgccgagggacgcgtgacgcatgcgtccattctcacgcctacggcgcagaacgtggcgaacctggaagccgacatgcgccttttggccgagaagctggtggccgacggggctgcggaagacgtcgtgcgcctcgagatcgagaagctcgtgcgagcctacgatccctgcctcagctgcagcgtgcactaaactgagacaaagggacgtgttgacgtctcgttcccttatgatggaaaggctgggatccgttacgggttccagcctttttttggtctgagacgagggcgagacagaggggcggagaggcggaggcgcgggtgtgcccctcgtggattttcatcatcgcgtcaacgcctgtgctagaattcggtttcacctggaatcgagattcaaggggtttcctgtatgtcctttttagacatgttctcgggtctgactggccagatgtccacggatatggccatcgacctcggaactgcaaatacactggtcgccatcccgggcgagggcatcgttgtcaacgagccctcagttgtcgccatcgagaaggcgacccatcgcgtgctcgcagtgggccacgaagccaagaacatgatcaaccatacgcccgaggcgttctcggccgagcatcccctgcacgacggcgtagtggccgactacgacgtgaccgaggccatgatctcggcgttcatcagcaaagcggcgccgcgcaagtatccctggcaggccaagcctcgcatcgtcatctgcatcccgtgcggcgcaacctcggtggagaagcgcgcggtgttcgaggctgccgttcaggccggcgctcgtcaggcgtacctcatcgaggagcccatggctgcggccatgggcgccgacctgcccgtcaccgagccgacgggctcgatggtcgtggatatcggcggcggcaccacggaagtggccgtcatctcgctcggcggcatcgtcacctcctcgtcgctgcgcctggccggcaaccgcatggacgaggccatcgccatgcacctgcgcgacctgctgggcatcaagatcggcgagcgaacagccgagatcatcaagatcaagatcggctccatcctgccgttcgaggacggtcgcgagcgcgacatgattatctcgggccaggatgtgatcaccgagcagccgaaggaggtcaccatccaatccgaggacgtgcgctccgcgctcgtgcagccttgtgaggagatggtcgtgcatatcaaggagacgttcaagaaaacgaaccccgatctcgcctccgacatcattcagaacggcatcctgctgacgggcggcggcggcctcttgtccggtctcgaccgctatctcaccgacaagctggagattcccgtgtggacgagcgagacggcgctcacgaacgtggttatgggctgcctcaaggtgctcgagacgcctacggcgctcaagcagacgctcatgcgctcgaaatagggttgagccggcttatcgatgacgcttaatttccaacagagaagctcggtgtttctgcgccgagttctgctcgtcgcatttctcgtagcctcgcttgcgctggtcacgttgtactcgcgcgaaggccaggacggcccgctgcacgcggtccagagcggcgtgtccggcgcagttgcgcctttgaagttcgtcggcgcggctgcaagcgcgggcgtgaacgatgccgccgagggtttcggcaacctcacggccgacgagagcacgctctcgggtctgcgcgagagcaacgccgagctgcgcgagctgctgagccaggccgatgagtacaagcaggaggctcaacgtctccagaaactgctcgagctcaaggacctctacgagatcgacggtgtgggagcgcgcgtcatcggcaatcccgaccaggcgtggagccaggcggtcaccatcgataagggcacggccgacggggtggagaccggccttacggtcatgggcacttccggcgttgtcggccaggtgtacagcgcgggcgagcataccgccgaggtgcgcctgctcaccgaccccgattccggcgccgcggcgcgcgtggagtcgagccgtgcggagggcgtcgtgcgcgggtctctcgaaggcctgctgtatttggaaaacctcgatgccgacgcggtggtcaatcctggcgacgtggtggtcacgtcgggtctgggcggcagctacgcgcccggcctcatcatcggcaccgtcgtgaaggtggatacccgccagggcgagtccacgaggcgcgtgatcgtatcgccgaacgacacgacgggcgccctcgaagaagtgcttgtggtgttcggcgtgggcgccgtaggcgaggccgacggtaacgaaggaggcgatgcatcgtgaacctgggacgcgaaggcgtcgtcatcgccgtaggcgcggtcgtcgccttgctgctgcaaatcgtcgtagcccccaacatcgcgctgttctcggcgcagccgaacttccttctggcctacgtgctggtagtcgctatcgcgcgcccgctcgacgccggccccgtgctgccgtttgcgctggggctcgtctgcgaccttttgggctcgggccccgtcggcggctacgcgttcttgttcgtcatcgtgtcgttcatcgcatcgcgcgcgttctcggtgctcgacaacgacacgctgttcatgccggtgaccattttcgtcgtcgcgacgttcgccgccgagatgctgtacggcgcgctgctcatcgggctgggcctgtcggcaagccccgttgacgcgttcctgtaccgtgcgctgccgtgcacgctgtacgactgcgtcgtgggtctcgtgctgtatccgatcatcgcgcgtctgcttgccagcggcgctcaggaccgcggaccgcgcacgccccggctgcgatagggggcgtttgccgtgatcgccgccatcatcgccgccgtcgccacgctggtcgtggccgtcatcgtggtatccgtcgtgttcgtcgtgcgcaacaacgcgaagtcgtcgaacgtgagcgtgaagaaggacgttcgctcaatcagctcggtgggcgtgaaatcgagcctcggaaacgcgggcggtcgcgtcaacggatccatgcaggcgcacccgggctcggcgcagcgtccggcgtccaacccggccgacaacctcaagtcgcggttcgtcgccatgggcgtgctggcggcgggcatcttcggcacgctgacggcgaagctgtggaccatgcaggtgctgtcgtccgaggcgtatcgcagcaaagcggacgacaaccagtacgccaccgtctccacgcccgcgccgcgcggctacatctgcgacgtcaacggcgttccgctcgtgaagaaccgcgtgtcgctgaccgtggtggccgatgcggaggtggccaacgaccgcgacgtggtgcagcgcctgtccgcggtgctcggagtgccgtacaacgtggtgcgccagcgcatccaggatgcgacggccggcgcgcagagccagcgcgtcgtggcgagcgacgtgcggcttcgcgacgtcgccttcatcaccgagcactccgacgcgttccctaaggtcaagatcgaggagcgctacgtgcgcgactacccctacggcgcgctcgccgcgcacgtggtggggtacacgggccccgtcaccgaagagggtctgaaaaccgtcggcgaaggccgcgaggtggagctgggcgacgacatgggcgcgtcgggcatcgagctgcagtacgatcatctgctggcgggcgaacacggcaagcgcaaggtggtcgccaacgccgacggcaacgttgtgcgcgtggtgagcgagacgcagccaaccaagggctcggacgtgcacctcgccatcaaggggccggttcagtacgtggccgaccgcgagctggccgcgctcatcgcccctgagaacgggactatcggcacgggcagcggcgtggcgggctcggtggtggtcatggaccttcgcgacggaggcatcgtggccatggcgaactaccctctgttcgacccggtcgaattcatcggcgccgtgtcgagcgacgtgtacgacgtgtacaattccaacgaagctcagaagcccctgctcaatcgtgcgatctcgggcacgtatcccgccgcctcgacgtacaagacgttcacgggcctcgcggcgctggccaacggcttcgccgacatgaagcgcacgtggacgtgcaacggctcgtgggacggctggggcacgggtcaggagcagatgtgctggaagcactcgggccacggcacgctcgacctccgcggcggcatcgtgcagtcgtgcgacgtcgtgttctaccagatcgcccatgacttcttcgaggcggctcgggacggtcaggtcagccagaccgcccttcaggactacctcgcgaagttccacttcgaccgctacaccggcatcgatctcggtggcgaatcggtgggcgtcattcccacgccggaatggaaactggagcatttccgcaacacgcccgaagaggcggtgtggaagggcggcgacatgacgaacatgatcatcggccagggttacgttctcgtcacgcccttgcaggtggccgtcgcctacggcgccgtcgccaccggcaagctgctgaagccccacttgctcaaggaggttcgcaacgccagcggcgacgtggccgcctcggtcaaggtggagaccgcgggggagctggacgttcccgaagccgacctcgcgttcatgcgcgacgccctcaacggcgtggcgaccgacaacgccgacgtgtcgaagctgctcaacgagcagggcatcgatcccgctacggtggcgtgcaagacgggtaccgccgagtacaccaacatggccgacaccgcgtggttcgcctgctacgcgccggtggacgatccgcagtacgtggtggcctgcgtggtcgagcacggcggcggcggttcggccgtggcggccccgctgggcgcgaaggttctggcggctgcgcttgccagcgagtccgcggaggatccgggcgccggcatgggcgtgatcgccggagccaccggcaaggtcctcgaaggcgcgggcgccgcgacgtccggcggccgtaccgactagacgaggcgaggaaaggaggcgttatgccgcagctaccgcagatcgattcagtgaaagcgcccgacaagatcgtggcgcaggccacgcgcgcgcgacgcttcccgtggctcaacatcccgttcatcctcgtggtggcgctgctggtgtcgtacgggctcgtcgtcgtgatgtcggccgtggccaacgaccgcgactactcgttcacgaaccagctggcgggcgtcgcgttgggaatcgtgttcatggtgctggtctggaggttcgactaccgccgcctgtcggacttcaccatgctgttcctcatcgtcaacgtggcgctcatcctctcgccccacataccggggctgggaaccgacgcgggcatgggcgcgcagtcgtggctcaagctgggcatacaggtccagccgggcgagttcgccaagatcacggtcatcctgctggacgccagcatcatggcgcgctacggcggcaggctggacgacccgcgcgagtacgtcaaggccctcggcctcatgctggtgccgttcgcctgcatcatgacgcagcccgacctgggcacgggcctggtgtacctatgcatcggcgcggtcgccctcgtggtaggaggtgcgcgtccgaagtacctgctgatcaccctcgcggccttcgttgcggccgtcatcgccgtgttcgtcgtggaccagatcatctacaactccaccggcgagtacaagctgctcaagcaatatcagcgcaaccgcctgctcgtgttcctcgatcccgacatcgaccccacgggcgagagctacaacctcaagcaggctcagatcgccatcgggtcgggcggcctgttcggcaagggcctgttccagggaacgcagcatacgctgggcatcctgcccgaggctcccaccgacttcatcttctgcgtgctggccgaggaactggggtttttaggtgtaatggcgctgctggccttgtatgccggcctggttttgataagctttcgcattgccgtcgcttcgtgcgatctgttcggcatgaccatcgtcatgtgcgtcgtcggcatgtggttgttccagattcttgaaaacatcggcatggattgcgggctcatgcccatcacgggcatccccctgccgttcgtgagctacggagcgacgggcatggtgatgaacttcatcatgctcggcatgatcggctcggtatggactcacaacatccagaagcaacgctaggaaaaggggcggttatgcagctacccgttgacatcaaagcggttatcgacgaagccaccaatatcgacgaggcgcgtcgcacgacgctgtcggtgagcgtctacctcgacgacagcgcgccgggcgacgtgcaggcgcacgtgcgccaagcgttcgccagcgcgtcgccgcacgcccgcgtgtcgctcatgtacctcgacggccgcccgttcacgccgttctcgggcgacgacatggccgtcatcgtggcgggtttgaacgagcaggtgggggagtacgcggcgcaggttcgcgcggcgggcgtccccgtgatggtggtcaccacgctgcccgctctcgtggccgacatcgcgaaggcgcagggcgcgcccatcccgcagggcgacctcgtcttccccaagccccccaaggccgagccggctgtgctgccggtgcccgatgccgctgcgggcggcgccgaggccgtgcaggctctgggcgccggttcgccgaacgagccgtacgctctcgacggcgccgccgtcggctcgctcagcgagcgcatgggcggctgggtgatcgccgcgtgcaacgacaagcgcctcgcgttcgcgctggcgttcccgttcgtgcgcaagcccctgtcgctggaagccgtgaactccacggcgctgcagaacgcgggcgtgggcctgctggtcatcattccgggcgccgacatgccggtcatgacgctcaaccaagcgaagatgctgctcatgattgccgccgcgtacggagaagagctcaacatggagcgcgtgaaggagcttgcggccctcgtgggcggcgcgttcgcctgccgcgcggtggcgcgccagctggtggcgttcgtacccgcgctcggctgggccgtgaaagccgccatcggctacacgggcaccgtcgccatggggcgcgcggccatcgagtactacgaggacggagccacgctgggcaagctcaccgacgccgtggccgcggcgcgcgacaaggtggtgcaggccgccgcgaagcgcgctgcgcagaaggcgcaggcgaccggggcgaaggccatggacgccgtgcgcgaccgcgccgggcgcgcggcacaggcggccggcggggtgcgcgatgccgccctcacgcgcttcgcttccggcaaagtccgctgattctcccgctaaagcaaaccgaagaagggaaacgagtttgatgacggatctctggccgcgtctggagccgctgctcgccgctgcggagcgccccgcgcgctacctcaaccacgagttcggctgcgtgtacaagcccgaagcggacttccgcttctgcatggtgtatcccgatacctacgagctggggcaggcgaaccaggcgctgcgcatcctcgtgaacgtggtgaacgccgtcgacgggatggccgccgagcgcgcgtttcttcctgcgcccgccatgtgcgacacgctgcgcgccgagggcatcccgctgttcagcatagagagctgcgcgccgctcgccgagttcgacgccgtgggcatcacattgccgcacgagctggcggctacgaacgtgcttgagacgctcgatttggcaggcatcccgctgcatgcagacgagcgcgccgaaagcgacccgctcgtggtggggggcggcccctgcgcctacaaccccgagccctacgcgccgttcttcgacgcgttcagcatcggcgaaggggaggaggccttgccgcgcggcctggccgtcgtccgccgcctgcgcgccgagggcgctgcgcgcgccgacatcctgcgcgcgctggccgacgagccgggctggtacgtgccgtcgctgtaccgctggcgtgccgaggacgaggcgcaggaagcgggctcgtggatcgagcctttggaagagggcctgcctctgcgcatcgagaagagcctgttcgagggcttcgcggaaagccctggctgggagccgtgcatcgtgccgttcaccgaggtggtgcacgatcggctgaacgtcgagatcctgcgcgggtgcgcccgcggctgccgcttctgccaggcgggcatgatgtaccgccccgtgcgcgagcgctcggccgacaacgtggtggaatcggtggtgcaaggcctggccgagacgggctacgacgaggtcagcctcacgtcgctgtcgtccaccgaccactcgcagatcgcctctatcctcacgcgcatcaaccgcgcctgcgacgggaagggcgtgcgcatctcggtgccttcgcagcgcctcgactcgttcggcgtggacatggccgagctggtggccggccagaagaagggcggcctcacgttcgcgcccgaggcgggcacgcagcgcctgcgcgacgtcatcaacaagaacgtcaccgaagacgacctgttcggcgcgttggacgccgcgttcaaggcggggtggcgccgctgcaagctgtacttcatgataggccttcccaccgagaccgacgacgacatcaagggcatcgcgagcctcgcgcagcgagcctacgaccgcatgaaggccgccacgcctcccgagcagcgcggatccttgcgcatgagcgtgtcgtgcgcgctgttcgtgccgaaggcgcagacgccgttccagtgggacgggcagatcccgcccgaggaggcgctgcggcgcgtgcagctgctgcgcaactcggtgaagtaccgcgccgtggacgtgcactggcatgatccggccaccagcttcgtggaggccgtgatgagccgcgcggggcgcgaagccgccgcgtgggtggagaccgcctggcgccgaggcgcgcgcttcgacgcgtggaccgagtgcttcgcagaggccgcttggcgcgaggcggcggacgaggtgggcatcgacccggccgccatcgcgcagacggcgtatcccacgacccgcgtcatgccgtgggagcatatttccaccggcgtgtcgacgcggtggctggcgcgcgagcgccgcttggccgacgagggccgcacgacgcccgactgcacgttcgagaactgctcggcctgcggcgcgtgcccgacgctcggggtggacaacgagctggcccagccccgcgtggcgtccggctcgaacgcggtcgagccctcgtgccgtcatggacgaagcggcgaagccgagctccttcgccatcccgggcaaagcggcgaagccgacgcctcctccgtcatcctgggagagcgaagcgagacgaaggatcccgcgcggcgcgaaggcgccggaaaggaggcgacccatgcctgatccgaacctgttccgtctgcgcatgacgttctgcaagcagggacgcctggcgatgctgtctcatctcgaagtggcgcgcgctctcgagcgcgcggtgcgccgcgcaggcctgccgttcgcagtgagccagggcttctcgccccatatgaagatcgcgttcggcgcggcgttgcccgtgggtgtgggcggcacgcacgagctggcagacctgcagatgacgcgctacgtgcctgtcgacgaggcgcttgaggctctgcagcgcgcaagcgtgcccgacctgatggtgaaggcgtgcgactacatcgagccgcacgcgccggccgcatcggcggcgtaccctatcgccgtctaccgcgcgctgctgtcgcaccctcccgcaacctttccggtgccagacgaagttacggtggtgcgcaagaagaaggagaaggtgctgtgcacggccgatttcctcgtgggggagctggagctgtccggcgccgtggccacgttctcgctggaatcgaagccgacgggctcgctacgtcccgacgtgctgctgcgcgcgtgctgcgaagcagccgatgccgtagcccccgaagcctccgcgccgttgcgcgtgctgtcggtcatgcgcaccgaacagcgcgccgctcgctgacggggaggggtcgcatcttccgcgcccgcttcgagcaagaaaaaaaaagcccgccgatcggcgggctttctgtattcagatggcgggatgtacgagactcgaactcgcgacctccgacgtgacaggccggcgctctaaccaactgagctaacaccccgtgctttgcagcgaaagctattctaccggaagaaccttcgctgcgcaatcattattatgacgaatttccccgatacgaaaagaacccgccgaagcgggttcttagcattcagatggcgggatgtacgagactcgaactcgcgacctccgacgtgacaggccggcgctctaaccaactgagctaacaccccgtgctttgcagcgcggaatatattaccgggtgtcgccgattcgcgcaataccccaatttgaaaaagtttgggaaagcgtgcgccgggttcgcatgcaggttctgtgatgagggaaacattttggtgtgaaatttcacagtagtgataaagtttagcgactaaattgtatacgacaggaatcgaaggcaaggaagatgagatgacggattcgttcaatgagacgaaacgcgagctgtacgagcttatgcagcgctcacggcgcgagcggttcacgccgccaacgcccgaaggcgtgacgccgtccgaggcgcgcacgatgatgacggtcagcgctcttcagcatacgtgcgaggacgtcaggccgggtcgcgtcgcggagctgacgcacacgacgccgagcgcgttgtcccagacgttcaagaccctcgaggagaagggcctcatcgagcggcaccgcgcaagcggcgattaccgcgccgtgtcggtaagcctcaccgaagagggcgagcgcttcgctgccgagggcagacgtttgcgcgacgagcacatggacgcggtcatggagcacgtgggtatcgaggacatgcggcatctcgttcgcatcctgcgcaaagtggtcgagttccacgagctggatcctgaggcgacgtgcaagagccgcgcggaaggagatgaggcgccgtgcgcataattcgctatctgaagaactgcaaggtggccgtgctgctcatcgtgtgcctgctcgtcgtgcaggcgttcaccgacctggcgctgccgcactacacgtccgatatcgtcgatgtgggcatccagcagtccggcgtggagcatgcggccaccgacgagatgacggccaagacccatgacgagatcgctatgatgcttccggtcgacgacgagcagacgttccgcgacgcttacaccgagacggacgacggcacgtacaagctcaacgaccagggcaagaaggagcaggaggagctcgaccgcatggtggccctgccgctggttgccatccattattccagccagatccccgacctcgacctcgaccaggtgatgcaggcctacgaggccggcgctatcgacaagcagaagatcctcgatatgctggacgaggccaagcagcatatgggggacatgggcgactccatcgtcgaccagcaggccatcgccgccgccaaggctgagtacgagtcgctcggctacaatctgtccgacatgcagatgggctacctcgtgcgcatcggccttctgatgttggggcttgccgccctcggcatggtcgccgccgtgctcgtgggcttcatcgcctcgcgcacggccgcgaaggtgggcgccacgctgcgctcgaagctgttccgccgcgtggtgtcgttctcggacgccgaggtgcaaagtttctcggccgcctcgctcatcacgcgcggcacgaacgacatccagctggtgcagatggtcaccgtcatgctgctgcgcatggtgctgtacgcgcccatcctcgccatcggcggcatcatcatggtttcgcgcacgaacctcgccatgagctggatcatcatcttggccgtggcggtcatcttcgtgctcatcatggtgctgatgcgcgtggcgctgcccaagttccagatcatgcagaccctcatcgaccgcgtgaacctcgtgtcgcgcgagatcctcacgggcctgcccgtcatccgcgcgttcgaccgccagccttacgaggagaagcgcttcgacgaggcttccaccaagctcatgaagacgcagctgttcacgaaccgcgtcatgacgttcatgatgcccctgatgatgctcatcatgaacggcgtgtcggtgctcatcgtatgggtgggcggcggctacatcgacaacggcaccatccagacgggcgacctcatcgcgttcatcacctacgcgatggtcatcatcatgagcttcctcatgatcggcatgatctccatcatgctgccgcgcgccgacgtggcggcccagcgcgtgaacgaggtgctggaaacaaagcccaccatctgcgacccggccgccgacaaggcccgcgacgccgagctgcgccgctcgggcgagggcgcgaccatcgccttcaacgacgtcagcttccgctacggcgattcgaaggaatgcgtgctcgagcacatcgacttcacggccgagcccggcaagaccacggcgctcatcggctccaccggatcgggcaagtcgacggtcatcaagctcatcgagcgcttctacgacgtgacggagggctcggtcaccatcgacggcgtggatgtgcgcgacgtcacgcagcaggcgctgcgcgagcagctgggctacgtgccgcagaaggcgtttctgttctcaggcaccatcgagtcgaacgtggcctacgcggacgaggggatgcccgtcgaccgcatcagggaggccgtcgacatcgcccaggcgtcggaattcgtcgcctcgaaggaggaaggcctgggcacgcgcgtgtcgcaaggcggctcgaacgtgtcgggcggccagcgccagcgcctggccatcgcccgtgcgctggccaccgaggcgcgcgcctacctgttcgacgacagcttctcggcgctcgactacaagaccgacgccgcgctgcgccaggagctgcacacgcgcctgggcggcaagaccgtggtcatcgtggcgcagcgcatctcgacggtgctgcatgccgaccgcatcgtggtgctggacgacggccgcatcgtgggccagggcacgcacgaggagctgatggaaacctgcgaggagtatcgggagatcgcgatgtcccagctgtcggaagccgagctgaacggaggtgatgcggcatgagcgcgcaggagaacgcccaggcgcaggaacctcgccgcggacccatgggccacggtcccggcgggcgcatgatgcccggcgagaagccgaagaacctcaagggaacgcttgccaagctgatcgccttcatgggtcgcttcaaggcggccatcgtggtggtgctcgtattcgccgtgggctccaccatcttcaacatcgtggggccgaaggtgctgtccacggccactaccgagctgttcaacggcatcgtggcgaagatcgacggctcgggcggcatcgacttcgacgcgatcgcgcggatcctcgtgttcacgctgggcctgtacctgctgtccgcggcatgctcgttcgtgcagggctggatcatgagctcggtttcgcagcgcacgtgctaccagctgcgcggcgccatcgccgacaagatcgaccgcatgcccatgggctacttcgagcgcacgagcgtgggcgacaccctgtcgcgcatcacgaacgacgtggacacgctgggccagagcctgaaccagggcgtcacccagctcatcacgtcggtgaccaccatcgtcggcgtgctcatcatgatgctgtccatcaacccgctcatgacgctgatcaccgtggtcattcttccggtttccatcgtgctcatcatggtggtggtgaagcgctcgcagaagtacttcgtggcgcagcagcgcacgctcggcaagatcaacggcatcgtggaggagacgttctcgggtcacgccatcgtgaaggcgttcaaccgcgaggacggcacggtcgaccgtttcaacgagacgaacgcgaagctgtacgggtcggcgtggaagtcgcagttcttcagcggcctcatgcagcctatcatgacgttcgtcggcaacctgggctacgtggccgtcgccatcgccggcagcttcctggccgtgcagggcatcatcacggtgggcgacatccaggcgttcatccagtacgtgaagaacttcacgcagcccatcacccagctcacgcaggtgtccaacgtgctgcagcagatggccgcggccgccgagcgcatcttcgagttcctcgacgcgcccgaggaggagcccgaccatgcgaccgcccgtaccgccgacgtggagtgcaacgtgcagttcgaccacgtgcgcttcggctacgatccggagaagccggtgatcaaggacttctcggcccaggtgtcggaaggccagaccgtcgcgctggtcggtcccacgggcgccggcaagaccaccatggtcaagctgctcatgcgcttctacgacgtgcagtcgggctgcatcaagatcggcggcacggacatccgcgatttcgcgcgcgacgatctgcgcagcctgttcggcatggtgctgcaggacacgtggctgttccacggcaccatccgcgacaacatccgctacggcaagctggacgccaccgacgaggaggtggaggcggcggcgaaggcggcctacgtcaaccacttcatccagacgctgccgcagggctacgacaccgagatcaacgaggacgccagcaacatcagccagggccagcgccagctgctgaccatcgcgcgcgccatcctggccgaccgccgcatgctcatcctcgacgaggccaccagctcggtggacacgcgcaccgaggagcgtatccagaaggctatggacaacctcatggccgggcgcacctcgttcgtcatcgcgcatcgcctgtccaccatcaagagcgcggatctcatcctcgtcatccgcgacggcgacatcgtggagcagggcacgcacgaggaactgctggcgcttggcggtttctacgcggagttgtataattctcagttcaccgagacgattgacgaggtggaggactagcgcatacgggcgcgtcttcgccccctcgctcagggaatgggaacagcgacgtatgcccgcaacgggaactgagagcgcatcagcgcagatgcaaggcgcgcctgaaagcaaggcgcgccttgccgtgttcgacttcgacggcaccagcatcgcgggcaactcgcccgtgctgctggtcagccaccttctgagtcgcaagatgctgaagaagcgagtcgtcttccgcatccttctgtgggcggccgcctacaagctgcgcctgccgcagaacgaggcggctgtgcgcggtctcgtgttcacggcgttcgagggcaagcccgccgccgaggtggacgccttcctcgccgagttctacgacgagcgcatcgcgccgctgttcaggcccgaggcggatgccgccatgcgcgcccacgccgaggcgggggacaccgtggtggtcatctcggccacgttcgagcctatcatcctgcgcgccatggagcaccatccgttcgacaaccagatatccacgcgcatgagcgtggccaccgacggcacctacacccgcgcggtggagggtctgccggtggagggggaggagaagctggccgccgtgcgccgcttcggcgacagccgtttcgggccgggcaactgggagctcgcctacgcgtacggcgaccatcattccgaccgcgccgtgctgtcggccgcggagcatcctcgcgccgtgtcgcccgatcggccgctcgcccgcaccgcgcgcgaaaagggctgggagatcctcgactggtagagccttgcgctcatacccttcgggttgcttacgttttggggtttttgcggttcgacctatgcgggggctttcttcttgggtaaaatgtgacctggacatagtcattttctcgcgacgtgcgatcacatcgaaaaggaggttgggtccatgtttgagaacgatgcgaacagctcgcccagccagaacgacgagcatagcaattcctcgaccgagtacctgcggctcgcttcccaggcgtgcgcttcgggcgacgcggtcctcggcatgcatctgtatctggcggcgttcgagcgcgcgcagcacggcgaaggctccgccgtcgacgaagcggcgctcgagggcctgaagcaggcctggcagctggcctgcaagctcaaggagcgctccatcgccgaatacgcgttcgagcgcctcgagccctacctgtcctcggacgaggccgcggcttgcgccgagcagctgcagagcctcgcgctcgacaagctggaggagtacggcctttcgcgcgaggacctggaggacatgaccgacatgatctcccaggacttcctgggcttcgatgccgcgcgcctcatgcgggtggagcacgtcaccgagccgtcttcggcgtgcgtcgccgaggctgcgccgcaggccgctcagagtgctgcggcggacgagggcggcgaggagggcgaaaaggccccgtccgtctccgaggtgcagaagtcgctcgccgaggccatccaggcttgcggcgacgacgcggacgctcatgcggtggtgtcgtccctcgagaacataacgtatcgcgagctcgtgggctacgacgagaccgtgaagctcatgcgcgacttcggggtgggcatgcagcacgacgagcgcttccaagagctggtggagctgctgaacgcgcgccacggcctggaccgcatgccggcctccgacgcgctgctgttccgttctccggcgcgcgaggacgcgaaccgattcatggcggccacgctgggcgagctggggctgccggccatccgcatgcacatggaggagaaccttcaggggatgccggtgctgtgcgtcatggcgcaggccgaccgccagccgaagctcaacgcggcgcgcaacgccttcgagggcgctggcgtgctcatgctggaggacttggatctgtggatgtcgcccatggtggagtcggccggcgacgatctgggcgggttcatcatggccagcctgtcgcggggcgcgcgcgaggccatcagcctcatccgctcggcggtggagaaccccgacgtgttcgtgctggcctcctcgtccgaggcgggggagatcgacccgttcttcttcgacctcctggagccgctgtcggtgatcgacatcgactttcccacggtgtccgagcgcgacgacatctggatggagatagcccgcgagcatccgtccctgcgcggcatcgaccgtgcatcgcttgtgcgctattcagcgcagatgccgcgctacgatatgtacatggccgcacgcgaggccatcgaggaggcttacaaggccagcctcgtcgcgcgccgctacctgccggtgacggcggacaacctgtacgacaagctggcggcttaccagccgctcgattccgacgagtaccgcgcgctcgaagaggcggtcgtgaacgacttcaggcgcgagttggagcatctggaagacctgctcgacggggaagagggaaactaatggacgtcacgcgccgctgcgactacgcctgccggatactgagggccgcctacaagagcggggattcctacgtgtcggtgtccgacatcgccgagcaggaggacattccctacgccttcgcgcgcagcatccagcacgatctggtgaagggcgggctcatcaagacggtgcgcggcgcccgcggcgggctcgcgctcaactgcgatccggccgccgtgaccctgctggaagtgctcgaggcggttcaggggccggtgagcatctcgctgtgcgtgatggatcccgcttactgcgacaaacagaaggactgcgcctacaacaagctgtggcagggagccgatcggctgctgaacgcctacttcggcgctatcacgctcaaggacctcatcgagcagggggcgtcgcatccggtggtggaagccgctatggcgaaggcgaaggacgcagacgcggttccggccgccgtccgctgcgctgcgcaatgcgccgcgcccacgccgcgcattgccgcggaggctcccgacgccgacgacgcgagcgcgtgcgaatcgtgcgcatagcgggttccggctcgattgcgtggccgtccgaggcgctcgggcgcgacgagttcgtggagcttgtgcgccgcgagggcgctcggctgcatcgcgacctgccctggcgttacatcgacgacccgtacgccgtgctggtgagcgaggtcatgctgcagcagactcaggtggctcgcgtcgagaagcactggacgcgcttcctgtcgctgtttcccaccatcgactccctggcggccgcaggcacggccgacgtgctggcgcagtggcaggggctggggtacaaccgccgtgcgcttgcgctcaagcgggcggccgagacgtgttcggccgagcggggagggctgctgcccgacacggctgaggagctggaaacgcttccgggcatcggtccggccacggcggcgggcgtgatggcgttcgcctacaaccgcccctccgtgtacatcgagacgaacgtgcgcacggtgttcctgcacgagctgttccccgaccgcgacaaggtttccgaccgcgagctggcgccgctcgtggcgtccacctgccccgaggacgacgcccgggcctggtactacgcgctgctcgattacggcgcgcacctcaagacgctcgtggcgaacccttcgcggcgcagcgcccactacgcgcgccagtcggccttcgagggctcgcggcggcagaagcgcgccgagctcgtgcgcgtcgtgctggccgagccgggcatcggcgccgacgagctggccgagcgcctggacgccttcgagcgcgccgccgggcgcgacggcgtggatgcggccacgttcgagtccattgtggccgacctcgtgtccgaaggcttcttccgccgagagggcggcgcgttcttcgcctgacggggcccgctgcggcgggaggttgcattctttgccctcctccggttccggtccgcgcttgggatggcatgcggtcgaatccttttcttgcagggcggcgttttcgagcgctttggacgcaaaacggtacccatggcaatcctgacggcggaatcaggttacgagagctcgctgaatagtacccacctggggttttgcacgtgatcctgatcggacggcatgcaaaacaggtctcgagattgtcatgggggctgattcgcgcccaatctcgccgggcttcccgccgcgatcggagcgcatggtcgagcgagctgaatctatgcagcgcgccgcgcgacctaccgagtgccgccgggcggactctccctattcaatcgcgtacgcattgctcctcgatagtttcttgtgcgcgaaatagcgtttcttgcatgattcttgcatacgattcttgactttcatgtgttagaatatgccgcatcccgtgggggagtagtcggccttgaacgaggtggctgcgtcaacatgctgcttccgctcgaagctggcgcaaccttaaacgacaagactcgcggtgtggcgcacgcgtcgcaccgctcatcatgcagccggcgcgcacgccggtatttttatgcctaaaccgtggagtgcggggcggccagggggggccgcaagcggacgagaggaaaacccatgggattcgtggagctgttgttgctggcgatcggcctgtcgatggatgcgttcgccgtgtcggtatgcaaaggcctgtgcatgaagcggctcaacctgcgccaggcgacggtcgtcgcgctgttcttcggcggcttccaggcgctcatgccgcttgtcggatgggcgctgggcacgcagttcgagcagttcatcacgccggtggatcattggatcgccttcgtgcttttggccctcatcggcgggaaaatgctgtgggacgccttccatgaggacgacgaggagctgtcctgcccggccgacggtaagctcgacctgcgcgagctcgtgatgctcgccgtcgccacgagcatcgacgcgttggccgtgggcatcacgttcgcgttcttgcgcgtggacatcctcacgtccgtggggctgatcggcgtgacgacgttcgccctgtccatcgtcggcgtggccgtgggccaccgcttcggcgcccgctacgagaagcccgccactgtcgtcggcggcatcgtcctcatcctcatcggcctcaagatcctgctggagcatctggggatcatagccttctagagagccggacgagacggcgctccggtcgggatggcaaccgggcgcgctcgctcaagacgacggtcggcccctacataatagggtagcttcccagcaccttgacctcgcgcagcttgaggcgcaggcagttgagcgcggtctgcacggcaaggtcgttcacgttctccttgaactcgatgaagaacatgtagtcgccgagcgcctgcttggtagggcgcgactggatcatcgacaggttgatgcccgcgtaggcgaactccgacaggatcatgttcagcgtgccggcgcggtccacctgcaagaacagcgcgagcgaggtcttgtagcgatcgccggtgaacacggggggatgcccctggcggccgatgagcgcgaacgacgtctgattcccgaaatgatcctcgatctcgcgctcctcgacgcgcgcgccgtacagctcggccgcgaacgcgttggcgatacccgcgacgcgcgggttctccatgaccagccgcgcgctctcggcggtggacgacgtggtgatggtggacctgcccggtaggcgctcgctcaggaagcggcggcactgcgcgagcccctgggcgtgcgaggccaccgtggcaacgtcctcgatcttcgcgtcggggtgcatgacaaggcaatggtggatgtcgatgacctcttcgccgaggatggtggccgagcttttgaaggagaagttgtccagcgtggccgtgacggacccttcgagcgagttctccttcgccaccacgccgaactcgcatttgccgcgatcgacgcagtcgaacacttcgtcgaacgaggcgcactcgaacaggtttggctcgtcgatgccgaggcgggctgcgaacgcgcgcgcggcttcgtcggtgtaggttccggcagggccgaggtaggcgaatacgggttcggttgaagccatgggtccaatccttctatcggggttctcggttattcgtgcttgtgctatcatacccgtcttcacgacaagatgaacggcggtgaacgagaaaccaacgggagttctcacctgttagcggtatgcatagagaggggcgaaaaaagtatccccctgcatgaaaatgcataaagtagctaatcaagtgtataactcatgttacgtggatgttgatgcgtaacatttttcagccacttgcgggtcaaacgttgcgctcgcgccctcgctgtgcgttttaattctggagtcgtggaaaatactgaatcagcaagcattggaagacgagagcacctgaggaggtgtgcacatggaaacagaggccacagtttcagagtttcagaacatgctttccgcgcgcggcgtcagccgccgcagcttcatgaagctctgcggcgccgttgcggtcgcggccggattgtccgagctcgctgcgccgcgcgtggcgcaggccctcgagaaatctgtgatcggcgcaacgaagggcaagctgtatccggttatctggatcgagggcgcgtcgtgcacgggttgtaccgagtcgtttgcgcaggtcgagacgccggatgcggcttcgatcgtgctggacatgatctcgctcaactactccgagaccctgtcggcggcagccggctggtcgatggaggaggccaaggagcagacgatcgaggccggcaattacatcctcgtgtacgagggagctgtgctggaaggctggggaggccaggctctgcgcgtcgccgacaagcccggtacggagcatctgatcgaggctgccgagaaagccaacgccgtagtcgcgctgggttcctgcgcggtcaacggcggctggatgggcgctcatcccaaccaggcgggtgcgctcggcgtgcaggcgttcctgaagaaggccggcatcaacacgccggttgtgaacgttcccggttgcccggccaaccccgagtggctcgtggccgtgctggcggacgtgatcttccttgagaagcttcccgcgctcaacagcgaggacaagcctgccggcatcttcgaccagacgatccacgacaactgcgagcgccgcggccacttcgagaacggcgagttcgtgtacaagttcggctccgaggaagaggccaagggatactgcctgtacccgcttggctgccgcggacctcagacgaaggcgaactgcggcgtgaccatgtggaacaaccgtcgcagctggtgcgtgcagtccggcgctccctgcatcggatgctgcgaggccaacccgaacgatcccggccataactgggtcgaggtcaacaccccgttctacaagcgtcatcgcgacctgcgcatcggcgactggatggttcagcccggcactatcgcgctcggcatcaccggcattcttgccgcggccctcgtggtgcacggtttcggcatgaagatcaccggccgcatggacggcggcgccgacttcgagaaggtgcgcggctgggacgcgaagcatcccgacaagtccatcggcaagtacgacgaggccgaccttaacaacgacgacaaaaaagaagggaggtaagcccttatgactcgttcagtcatcgacccgattacccgtatcgaaggccatctccgcgtcgagatggaagtgaccaacggcaaggtttccgatgcctgggtgtccggcggctgcttccgcggcatggagatggtcgtcgagaaccgcacgcccgaggatgttgcccagatcgtgcagcgcatctgcggcgtgtgcccggtgtcccacgcccactcgtccgctatcgcggccgaaaaagcctacggcatcaagatctcgaacaacgcgcgcatcatccgcaacctgctggaaggcgcgcagttcctgcacagccatatcctgtggttctacaacctggctgccctcgactacgtgaacccgctgaacgccctcaaggccgatccggcggacgcttacgaccttgctcaggctgcaggcacctccatgaacagcgacttcgtcgcgctcaaggagcgtctggcgaatttcgccgacaacggccagctgtccatcttctccggcaactggttcgacgcggaggacggcacggcttaccagctgccgcccgagctcgacctcatctgcacggctcactaccttgaggcgctgacgatgcaggccaaggcttcgcagatctccgctatcatcggcggaaagatgccgcacgtcatgacgctggtaccgggcggcacggccttcgtgcccaccgatcagaagcttgacgagttgaaagcccttgccgatgagatttacgactgggtcgagtcgaccatgatccccgacacccttgctatcgcgccgtactacatcgatgcgttgaactggggaaagggctgcggccgctatgtggcttggggcgtgttcgagggcccgggcgactacgccagctacaccgagcagatggcgaaccgctacctgcccatgggcgtcatcgacgacaagctcaacctctccgacgtgcaggagaatctcatcaccgagtacatgggccgctcctggtacaagggcgatgccacgtacacgtcgccgtacttcgtcaccgagccggagtacaccgagtacaacgtcgaggaccgctacacgtgggtcaagtgccccgcctacgacggcaagccttacgaggctggcgggctttcccgcgtcttggccgcgtacaagcgcaacgtgccgttcgtggtcgagcaggttgacggccttctggaagcgctcggcgctcccgggcagatcggggtcgcgcagtcgacgctcggccgcaccgccgttcgccagatcgagacgctctacatcgccggcctcatgaaggactgggttgccgagctcatcgaggcgctgaagagcggcgacagcgagtacttccgcgagccgtccaccatcaccggcgccggcacgggcttctgggaggctccgcgcggcgcgctctaccactccgagagcatcaaggacggcaagatcgagggttatcagatcatcatcccgacgacgtggaacctcgctcccatcaacgagagcggcgagcacggcccgatggagcaggcgcttatcggcaacccggtgggcgacatcgagaagccgatcaacgcgctgcgcacggtgcacagcttcgacccctgcacggcctgcgcggtgcacatcaccgagccggcgacgggcaagagcttcgagaccgtcacgagcccttggggggtgaagtaacatggcgcacttggcacattaccgcgaagcgcatccgatgcccttcgtcatcacgcactggatcaaccttgttgcgatgatcctcctgatcatcacgggcttcagcatccacttcccgttctggggcggcttcatgggcatagcccgcggagttcatgtgttcctgggcttcgtgctgttcatcaactgcatcgtccgcgtgatcatggctttcttcgtgaagtccgcgccggatggcggcacccgctaccaggtcacggactacaagacgtggctgccgcaggctgacaaccgtcaccagctgggcgcgtggattcgctactatctgttcttcaagaaggatcacccgctgggcgccaagctcggcgtgcctcagaagatcagctacctggccatccccatcctcatcatcgtgatgttctacacgggtctcgccctgtgggctccgacgatgaactgggcgttctttgcggcaggcactgatctggtgggcggcctcatgtcgatgcgcatcatccactacttcatgatgtacatcttcatctgcttcatgctcatccatatctacctggcgaacatcgagggcatctctccgacgctgctcatgttcttctggaaagagcacggcggtctggtgtacgaccccgagaagcacaccatcgtgggcgaggacgacctcaagcacggcgaaaaggcgtaagcttccagcttcggcactgacgaaaggacccgggaaaccgggtcctttcacgtccggagtggggcggggaatcgcgtgccaggggtgtgtggaggggacgggggatttgacgcaccgggggacttcgtgtgtcaaatcccccgtcccctcgacacgcgctcaagatgagggaggtcctcgctagccctgttcgcgctcgacgaacctgacgaaggcgtcggcttgggcttcgaggtagggtgccgaggattccagcttgaggcgcccctgctcgtcggcctgcgtggcgatatgggggatgcacaggcgcggcttgttcatcacgtgcgcgtcgaggaagctcagcatgcccacgagctgatcttgagcatgcgaggcgccgctcatgccgatgctcgcgccggccagcgcgacgggcttctccgccagcacctgcgcttcggtggcgcttacggggcgcgacagccagtccaggaggttcttcagcggtccggggatcgcgtggttgtactcggggctgaacagccacaagccgtctgcttcgcgaacggcctcgcgcacgcgcatcaccgcttcgggggcgggatgctcgatatcctggttcatgaacggcacgtcttcccagcggagaatgccgtatccgacctccgggtgcttctcgcgcatcagggctccggccgcttcggccagttgccggttatagctgttctcgcgcagggatcctgcgattgccagcagcttcatgacgtctccttccgctcggctaaagccccctcatgtgcgggacttcctcgtctataatggcagacaatcgacgaaggcacgaaagggataacgaattgtgactgaattgaccgacgaacagatcgctcgcgaagagaagttcctcgagggtattccccggctcaacatcggcgcgctgttcctgccgcctatctggggccccgcgcacggcatgtgggccgctatcctgttctatcccatctggctgttcgccgacaacacgttctatgcggcattcaccgagcgcacgccgctggcaataggcatcgcgttgatcgtattgctcacgctgacggtgggcacggtggtgttcgccatcctgggccagcccttcgcggcgcatcgcgcggcgagcctcggtcaggacaaggagacgtacctcaagcgcgagcgcatctggacgatagcgagcgtgatcgcaggcatcgcgatgatcgcggcggcgacgtactacaacttggtcatccgcccgacggtgggggcgtaaggtgggtgctgcccggcgcatcgcggtgttctgcgttggcaacaagcttatgctcgacgacggcgtaggccctgccgtgtacgaggagctgctgacgcgatacgatattcccgacaacgtggagctgttcgatttgggttgcctctcgctcaacatgatcgagcgcgtgcgcgagtacgacgttatcatcacggtggatgcggttgacggcaccgatgccgatcctggcacggtgtttcgcttcgagcccgatgccatggcgcgccattcgggagcaacagcgtcgctgcacgatctcaagctggtcgacctgttcgacgccgctgcgcttttaggctacgaagccgagggcctgtgcctgggaatgcaggtggagaacccatcgcctgccgtggtcaccgtggggctgactccgaaagtggatgcggcgctgcccctgttggtcgagacggtggcaggggagcttgcgcgcctgggctcgcctttgcgagcgcgggcctagatcgatctgatgcgctggaagacgcgggactaagaggccgtctgcggcgtgatgaaccgttcctcgaagctatgcgccggaatggggcacgagacgaagaaaccctggatgctgtcggcgccgatggcgcgcacggcgtcgagctcggtgggttcttccaccccttcgaccgtcacctcgatgcccacgctatggcacagctcgatgaccgcatctatgaacgcgcggttgaacgcttcccggtggatgtccttgatgaacaggcggtcgatcttcacgatgtcggcgggcgactgggccagtaggccaagcgacgagtaaccggtgccgaaatcgtccatggcgatgcggatgccgatggagcgcagacggtcgaacgtggcgcgcagcgcgtccatgtcggtgacgaagtagctctcggtcatctccagcacgatggacgccgggtcgaccccggtgcgctcgacgagctgctccacgaacggcacgaagtcggcgtcgagcagctgcaggtaggagatgttcacgtccatgatgaagccgggatgcgtttccgaccagcgcttgcactgtgtgaacgaccgctccagcacccagcggcccacctggccgatgagcccgtacgactccagcacgggaatgaactccaccggcgagagctggccgtgctcctcggaattccaacgtaaaagcgcttccgctccggcgatgtccatggtttccgcgcatacgagcggctggtagtacagctcgaagttcttcatatcgtcgaggacggaagactgcatgtagtcgctgatctccaggcggcgaagtttcgtcgcgatcgtcgcggacgagaagaacgtggaagtgttcttgccgcgctgtttgctctcttccaacgcgttctccgcgttgcgcagcagatcttgggcgctctgggcgtcttggccgatcatcgcgatgccggccgacaccatgcagaagaagctcaagtcgtcgatggtgtgttggcggttcgcaaccacgtggatggcgtggtagagctcttccatggcggcgcagccggcgccgtccatcacgatagcgaacacgtcgccatcgaggcggaacatggacgctccttcggggatgaggcgttgggtggactgggcgaacattctgagcacggtgtttccgaaagcgtggccgttcagcaggttgatgcgagaaaagtcatcgagccccaacagcatgacgccgccctgcgattcgcaggcgatgagccgatcgatgaggttcatgcattcgtcgtgcgtgaacagcccggtgactgagtcgattttacccttgcgctccagacaggtgaccacgccggcgaacatcgtcggctggccgttctcgtcgcgcttcagaagtccgcggcacatcacccagatactttctcccaaggcgttcttcacctggtattcgagatcgtggcagtcggtttcccctgagagcatgctgtcgatcgaatcatcgaagcgcttccgatcgcgttcgacgatgagttctctccagagagggatgaggccgggaacgaggctgtccggcaggtcgaagtcgtcgcgcatgttgtcggagacgagcgcgatatcgcgttgcatgtcgatgatgtacaggtagtcgtccgtgctgaacgctatagcgtcgtagaacagtcgcgcgtcgagctcgaacgacttcagcgcttctttcgtgtccaagaagtgcgctccgtttcaatgatccgttgagcatgccttctgtattgtaaacgcaatcggtgcgttttcgagcgtaaatgcttatcgaagagggggagattttcatcgatgggaaaatgtgccggatggcggcgcaatgacgaaggcttctcgttttgtccacagtgcgccgttgcgaccgcgcaccggcataacttggggtaacgtaccggaggaaacgattgacgcgaaggagcatccgctcatgcacatccacaccatcagcgcttacgagacttcggcagaagagttcttcaagcgcctcgtcgactggaaggtcgacctcgtggtggacacgaggctgaagaacacgaaccagctggccggcttcacgaagcgcgacgacctggcctatttcgtcgaggagctcgtccatgcccgttatgtgcacgacaagctgttcgccccggcgcccaccatgatggagcgctatatccacggcaacatcgggtgggacgcctacgccgatgcctaccgcgaggatatgcgcgagcgtgaggccgtgccgcagttcttcgaccgttacggggactgcgagtccgtggcgctggtgggaaccgccacgcgctctcgccgctcccatgtagaagtgcttgccgagatgttggaggagttccagaaggagtagggaggcaactcccctgtcgtcctgatcgagcgcaagcattcgacagtccggtgtactgtcgaactcccgagcacacgaagcgagcgcagggaggcaccgcgaagcggggacgcgaaggatcccgtgcggcgttagctgttagcgttacggctgtcgccacgcgggatccttcgactacgcgcctgcggcgctccgctcaggatgacaaagggaatgagcgacatcccttgaaaaactagcgatcgttagttaatatactagcagtcgctagttttgtagaggagagaccatgcgggggaaggacacgaaggaacgcatcgtcgaggaggcgttcgcgctgttcgcatcgcgcggcttccatgcggtgtcggtgcgcgacatcgcggctgccgtcggcatcaaggacgcgtcgctgtacaatcatttttccggcaagcaggccatattcgacgccatcgtgcgcgatgcgctggagcggacgcgtcggttcttcggcgagcgcaacatcctgttcgacgtctccgacgacgcgacgccgtacgaggagatgaacgccgagcgcatgcacgagatggtgctgccgtcgtttcgctacttcttcgaggatccgtacatggtgcgcctgcgccatttgctggtgatcagccagttcgagagcgaggaggcggggcgcgtctaccgcctcgtgttcgtcgagcagcccatggcgctgcagcgcaccatcttcgagcacctcatggccacgggcgagttcgtccgcgacgacgccgcgcagatggccgtcgaactgcagggcgtcccgttcatgctcatgcatgcgggtctgacatgggaggaagccgaaccgcggctcgccgcccacgtcgagcggttcgcgcgggcgcatacggcggcggggcggggcattcgaggaggggagcgggcatgagcacggtggttgtgtattcgtcgcagacggggttcacgaagcgctacgcggagtggcttgcggaggagctggggtgccaggtggtgtcgctcggcgacgagccgcggttcgacgcaagcggtttcgacgtggtggtgctgggcggatggcttcatgcgggagggctcgcgggcaagaagtggcttgcgcgcgcccgtgagaagcatctgcagacgcggttcgtcgtgttcgcagtgggcgcgacgcccgtggaatggaccgacatggtggaagaggcgcttgccaaggagctgccgtcgccggagttcgatgacgtggagcgcttctacctgcgcggcgggttcgcctacgagcgcctgggcttgccggacaagctggccatgaagctgttcttcaagatgcaggagaagaacgccgccgccgacccgcgcgccgccgagatgctcgagggcatgcgcggcggctttgacggcaccgaccgcgccgccatcgcgccggtcgcggcgcgcgtccgcgcgcttgacgccgccgcggtgtcggcgggaagcgcggagcgcgcatgaacgcggcgcgccgcatcgtgcgtgtcatctgcgtgttcaacggggtgtgcgcggtggtgtgcggcggcttcatgatggcgggcgctgcgggcatcctgccgcccgcgttcggcgagctcttcggcttcttcgacctcatggtgcccttgattcagcggatgccgctgcctgcgtatatgacggccgatctgttctggccggggcttgcccttgcgctcgtgaacggggtggcaaacctcgtggccgctgtgctgttcgcgcgcagcgatgggcgcgcgcgttcgtgggcgctgctggccggcgcgctgctcatcgtctggtgcgtgttcgagctcgtgtacctgccgaatccggtctcggtgatctacctggtgatcggcctcgtgcagacggcatgcgcggtggtgatgcgtcccgcgcgctagcggcgcgcgggttcgtgccgcatgaggccgtgggccgtgcagtacgtgtagagcttcgcgccggcgaggcggggcaggcgcgcttcggcgccctgctcggggtagagtttttcgacggtcatgcggtcgaagcccacgacggcgacgaagccgaggtggtgctgcttgttcatctcgtggtcgaaggtgacgtaccagtcgccctcgatcggctcgacgtgcacggcgtgcgcctcgtcggctggcaaggcgacgagcgggggcagcttcctgccgcagcaggacacttcggcgtcgccggtggtgacgatcacgttgtcgcaggcggggcagacgcggaatgcggcgcgtttcatggttcctcccgttcggacatcgacggccaggcggccgtcgagcagcgtttccacgggagttcccaagcgttcggacaggccgggcaaaagctcgatgtcggggcagccgcctccgcgctcccatttggacacggccttgtcggtgacgccgagcgcgtcggcgagctggcgctgggtgagcccgcgctcctcgcgaagcgcgcggatgagcgtgccggtgtttctggcgtccatggcgatcctccctggttttttcggacggcgtctacgatacgcgcgcgccgcggccggcgcaatgaacgctccgtagagtcgcgtctcccggcgtagcggaggcggcggacaagcccgtcagcgccggagcgcctcggctcgcttcacgcgttcgacgagcacgtctttcacgttctcgcgcggaacggccagcgacaccgcaagctcgtcgcacagcaggccttctgccaggtcgaagtacttcttgtccgtggcggtgatgcggcggcccgaatcgacgcgccggacggtgcgctcgtggacggacttcatgatgggaaccagatcctcgggcgcgaacgttctgaggcgcttgtcgtattcttccttcatgcggcgctccaacagggtgggcatgggcgcgtcgggcttgagggcattctcgtcgatggtgtcggcatccacgatggaatcgatcagggcgagtgccgcgcgcttcgacatgatgggacgcaggttgtcgggcgtggcctcgtcgacggcaacgaacagcttgagcgagttctcgaacagcgcgcgcagctcgaggtagtcctttccttcgaagtagttctcgcgcagggcggcaacttcgcagacatgatgacggtagacgaccgtatctccgcatgcgtacatggcaacctccgatgatgggtgggaacggtaggtgcggttcagtcgcgtcgcggtgacgtcgcagaatcagcacttcgattgtaccacttcgcgggaagcgtgcgcgcatcccgcttcggcgagcggcggagcctgactccgtccagttacgggtagcggctgacgcgctgtcgcttggaacagacgattctgcgggaaaagcgtccgcttcgggcgacagcgcgctcccgcgggccacggcctctgcaggagcgcggcaaagcctgcgcgctacgcgaacagctcggccgccttctccatgcgctcggctatcggcacgccgaaggggcagcgcggctcgcaggcggcgcaggccgtgcagtcgtcggcggccgcgtcgagcgcgcggtagtgctcgcggatcgaggcgggcacctcgctttgcatgacagccaggtcgtagaacttgttgacggcggcgatatcgatgccggccgtgcagggcgcgcagtggccgcagtaggtgcactggccgaagtaggcgtgtttcggcgctcccgccaacacgctcgcgtagtccttctgcgcttcggtcgccgtttcgtaggccacggcgtcgtcgacgtgcgccggctcgtcgaagcccgccaggatgctagccgcggcggggcgggtgagcgcgtaatggatgcactgcacgggcgtcatcgccgcgccgaacggagacgcctcggcgctgaacagacgcccgccggcataccccttcatcaccgtaaggcccacgccctcgcgttcgcacagcgcgtacagctcggcgcgggtgggatccatgccttcgagcgcgtcgtcgtaggcgaaggtgaatgcgtcgtcgaggctggccgtggccggcaggaggtcgaaggcggggttcacgctgaacatgacggcttcgatctcgccggacagcgcggctcgcttcgccacctcgggcgcgtgggtggacagcccgatgtgcccgatgacgtcggcggctttgagcgcgcgcacgtattcgatgaactccccggccatgatgccctcgtactcgttgatgtcgtcgacgtagtggatcatgcccagctccacgtggtcggtgccgaggcgcgcgagcaggtcctcgaacgcgggacgcacgagattcatgtcgcgcgtgcgcacgtactggccgtcttgccaggtggagccgatgtggccctggatgatccagcggtcgcgcgtgccggccaacgcagctccgaggttgctgcgcacctcgggtcccgccatccagcagtcgaggatgttgatgcccgcttcctcgcagcgctcgaccacggcgcgcacctcggcggccgatttcttctccatccattcagctccgaagccgatctcgctgatttcgagccccgtcctgcccagttcgcggtagcgcatacaaacccctctcgcgatagtccttcgcgttcgcatgcagcacgcttccgtactgcttcttggagcgaactctaatccaagttttttcttcttacgcctttccgcagctggggcagaggtcgcacaggaagcacgtcgcgcacttcgggttgcgggcgatgcacgtttcgcggccgaacagcacccattgatggttgatgggaccccagtattcgcgcgggtacagcttgagcagggcggcctcggtcttcgctggcgtgtcggccgaggggccggcgaacttcaaccgatgcgcgatgcggaacacgtgcgtgtccaccgcgatgccctccacgatgccgaacgcctcgttgagcacgacgttcgccgtcttgcgccccacgcccggcagcttctgcagctcgtctatgtcgcgcgggatctcgccgccgtagtcggccactaccatctgagcgcacttgatgacgttcgccgccttcgtatggaagaagccgatggtgcggatgatgccttcaacgtcgcggacatcggccgctgcgaggtccgcgggcgtggggtagcgctcccacagcgcgggcgtgaccttgttcacgcctttgtcggtggtttgggcgctcagcagtacggcgatggtcaagcggaacggatcgccccagtagtgcagcgcgcactcggcggcggggtaatgctcgttcatgcgctccgccaccgcaagggcgcgctggcgtttggcggtcatggtctcgcgtggcataggatctcctcgggatgcggttttagcgaaactcctcccagtataatgaagttcttcgtccgtgtcccgctttcgaggacggcgaacggcggatgcgcgccgcgattgccgttcgccgtccgattgctggtaccgctcttgccgtcggtgtcgtggggctagccctcgtgcacgatgcggccgtcggagatcgtgtagcgcacggtgctgtcggagatcttcttcgggtcgcaggtcaggatgttctggtcgagcaccgcgaggtcggccttcttcccgacctcgatggttcccacgaggtcctccatgaagttctcgaacgcgacgttcttcgtgtaggcttccagggcctggtacggcgtgatggcctgctcgggccagcgatgcatatcggtgtcctcttcgccgggataggggctgttgcgcgtgacggcgacctcgatctcctccaggggcgcgaacggggtgaccgggccgtcgctggcaccgctcacgatgcagccggcttccagcatgttcttgaccgggtacatggccatcgcgcgctcttctccgatgtaggcgatctcgagctcgcacagcgggtcgcggtacatccacaggaactgcagcgcgctgatgacctcgaggtcggcgatcctcttgatgtcctcgtcggctacggcgcacacatgggtcatggtgtagcggcggtcggcgcgctcgccgttctccttgatcgcgttctcgaaggcgttcagcgtgttgcggacggcaccgtcgccgatggcgtggacgtgcacctgcacgcccgccttgtcgagggcggccaccatggcgtcgaactcctgctgatcccattcggattcgccgtaccagtccgaccccttgccggcggcttcgttgtacggttccagcatgacggcgctgccgccttcggtgacgccgtcggagaacatcttcgcggtgccggtggatatcatctcgctgtcgtagcgtgccagtcccttgactgttttgaccgcttcgctcggatcggtgccggggatgatggtgggcaggatcctcatgcgcaggttgagctcgccggccttttccagttcggagaagaagcgcgcgtccacggcggagaggttcgtgatgccggtcaggccgaagcgcgacgcgtcctcctggtactttgcgatggcctgctcgtactcttcgtcggtgtgctcggacacgacgagggcggacacttcggtggcggcgccgtcgatgagatatccggtgggctcgccgtcctcgtccctcgtgatgatgccgccgagcgggtcgggcgtgtcgcgcgtgatgttcgccatctcgagcgccttgctgttgacccaggcggagtgatgcgagacgtccaaaagcaggatgggcttgtcggggcagatctcgtcgagcagcttcttgttcggcccggggttgctgccgtcctccagctggaacgcgttcaccatgaacgggttgcccgtgtacgcctcgcgctcgggatgcgccgcgacgaagtcggagatgatcttcacgtactcgtcgacggtggtcgcgtcgccgaggtatatgtcgtagagcttggtgacccagtctcccggggcgtggatgtgaccgtccatgaagccgggtaccaccatgccgccctcgaggtcgatcaccttcgtgccgcttcccacgaaggcttcgagccccgcctcgtcgccgacgtagacgatctcgttgccgtcgacggccaaggcttcggcgacgtcgttctcggacgtcatggtttggatcgtgccgccgcgaaacgcgagggtggccgttttctgctgggcgccggcgcctccctccgcctcgtccgtttgcgcttcgccgttttcgcttccgcagcccgaaagcgccggcaagatgaagagcgtggccgctcctgtcgcgccgattttgacgaacttcctacgggacaacgtgttcgatggttggttcgtatccatggcgtgctgctcccttcctcgtgcggcgggtcgtgtcgaccgcgttccagccgcttcctgatgcaggtatacaggcggattcgccctgtccggaagtcctatttgcgtttatacgaggcgaacggctcctatacccgaaataaccccgggttggtattgcgcttcgagcggcggagccgtaccctggcgagcttaggggagtcttcgccagcgcgaatgacggagggtggttccgatgacgtatccggtattcctgtacaacatgctccttgcggcgacgtacgtcgttctcgcggtcgtgttcttctggctgcaccgttcgcggtccagccgtctggcgtggtggctcatgatcctgttcgcctgctcgttcgtggacaacggaacctatttcatgaaagaagtgttcacggcgctaggccatcccgatcctctgttcgcgacgttctaccaagctgcggaagccctgttcatagcctgctaccccttcatcatccgcatgatcagcggttgcttttacgatgatatgccgtcgaagcgatcgatggtcgtgctcggcgcggcttgcgccgtcgcgacggcgctcggcgtcgccgcgcccgtcgtgccttactcggtgttcggcacggtgtacccccttctgtacgcgtgggtgttcctgcggctgattcccaagatggacggcgtttggccgaaggcggtggtcgtctcgctggtggtgctgcacgtgatcgacgcgacgtgccgtgtgctgggggtggaggccgtcctgttctgggagaaccgcgaccttctggtggaaacgtgctgggcgatctacgtcggatgcgccgtctatatcgcgtggacgctgctgcacacggtggagcagccgtacctgccgaacgtcgacatgtcgttccggcgtttcctcgacgcttacggtctgagcggccgcgagggagagatcgtgaagctgctcatggagggcgagacgaaccagggcatctgcaacaagctgtacatcgcggcgggcacggtgaaggcgcacaaccacagcatttacaagaagctggggatagagaaccgctcgcaggttttgctcaagtacaccgattatctggagcgtagcgcccaggaagcgcgattgttctgctgagcgctggcggttccccgtccccttgtggtttctccttcatggtgcgctgtcgggcgtcgcgcgagagcttatcggatggtagaatcggcagcgccgtccgcgcgtgcgcgcagacggcgaccagaaaccttgcatgaagccgccgatcgcggcttttcgtgctgttcgcatacggaagaggacgcgccatgctcatcgattcattgacgttcaccctggagaaatcgggctgcctcgacgcgttctggggcaagctggacgcgggcgaggacggcacgctgggcgtggcctcgtcggcgcgcccgttcctcgtggcggcgcggttcgcgcacaggccccagccgacgctcgtcgtggtggcgggcgaggacgcggccgtggcgttctcgcgcagcctggcggcctacctgggcgacgagcgcgtcatgcgcttccccgagcgcagcgactaccccttcgtgccgaagcccagcgaccctgcgcaggtggcacggcgcatggaggccgtgcacgcgctggccagcggccgcgaggtcgtggtggtagccagcgcccgcgcgctcgtgcgcgcgctgccgccggcgggctccgacgtgcacgtgccggtggcgctttcggcgggccgcgagctggcggccatgcccggcgctcaggcggcgagcgtcaccgagttcgaggattttgcccatgcgctggaggagcgcggctaccggaacaccggcgagctggacggccccggcaccttcgccgtgcgcggcggcacgatcgacgtgttccccggcaacctcgtgtacccggtgcggctggacttcttcggcgacgagctggaggagatccgccgcatcgtgcccaccaccgggcagaccatccaggcgctgccggacgtgagcatctaccccgtggtggagttctcgtgctccaagcgggggctcgcccgcgcgcgccagaagctggagcggccggccgcgacgaaccccgtgctgcgcgacgtgctggagaagctggacggcggcctgcgcttcgacggttccgacatgctgctgccgtacctgtacgcgaccacgtccacgttgggcgattacgtgcgccccggcgcgctgagcgtgcttttggagccgcgctcgctgttcgacgacatgagccacgcctacgacgacgcggcgggacgcgcgaagggatcgagcatccccgtggacgggctgtacgccgagcccggggccgtgagcttcggcgaggggcagcgcgcaacctacgtgtccatcatgcgcgtgggcgggcacgtggacgacgagctgccggtgaagcgcgtggaggtggcggggcatcccgacaagctgttcggtcggctgcgcagcctcgtggacaccgactacacggtggtgttcagcgcgtcgaacttccgtgcgcgccaggacatgaagctggcgttcgtcgaccacggtctgccgatccaagagacgctggacgcggaagaggacgccgacgaactggaaggtatcgccaagcgccgtctgcggcggggcgtggttaacgtggtggacgtggacgtccccctgggcatgatcatcccgaaggcgaagctggccatcgtcagcctgtcggacacgcagggggcgtccacgtcgcggccgtcgcgccacgtggacatcaccgagatcaccttcccgtaccagccgggcgactacgtggtgcacgccgctcacggcgtggcctacttcaaggagctggtccgccgcgacgtggacggcaccgcgcgcgactacctgctgctggagtactccgagggcgacaagctgtacgtgccggtggagcagctcgaccgcgtgacgcgctacgtggggccggagggcgcgagcccgcgccttacgcgcctgaacacggccgattggtcgcgagcgctggccaaggcgcgcaaggccacgaagaagctggcgttcgacctggtggacgtgtacgcgcgccgcgcgtccgtgcaaggctaccgcttcgggcccgacaccgcggcccaacgcgagatggaggaggcgttcccctaccaggagacgcccgaccagctggccgccatcgcggacgtgaaggccgacatgcagtcggcgaagcccatggaccgcctcgtctgcggcgacgtgggcttcggcaagaccgaggtggccctgcgcgccgcgttcaaggcgacgcaggactccaagcaggtgatggtgctgtgccccaccaccatcctcgcgcagcagcactacaccaacttcaaggagcgctgcgagccgttcggcgtgcgcgtggaggtgctctcgcgcttccgcacgcccgcgcagcaggccgccgccctcaagggcttccaggaaggtgacgtggacgtgctggtgggcacgcaccgtttgctgtcgcgcgatgtgaacccgcacgacctggggctggtcatcatcgacgaggagcagcgcttcggcgtgggccacaaggagcagatgaagaacctgcgcgagtccatcgacgtgctcacgctgtcggccacgcccatccctcgcaccatgcagatgtcgctgtcgggcgtgcgcgacatgagcctcatcctcacgccgcccgacgagcgccgtcccgtggaagtgcacgtgggcgagtgggatcccgacgtggtgagcggcgctatcaggcgcgagctggcgcgcggcggccaggtgtactacgtgtcgaaccgcgtgcgctccatggaggaggcggtgcggcgcgtcaccgcggccgcgggcgaggcgcgcgtgggcgtggcgcacgggcagatgtcgaaggagcagctggagcgcgtgatggaggacttcagcgccggcgagctggacgtgctggtggccaccaccatcatcgagagcggcatcgacaacccgcacacgaacacgctcatcatcgaggactcgcagcgctacggattggcgcagatgtaccagctgaagggccgcgtgggccgttcgtgcacgcaggcgtacgcctacttcatgttccccgagcacatggagctcaccgaggaggcggccgcgcgcctgaccgcgctgaacgagcataccgatctcggcagcggcatgcgcatcgccatgcgtgacctggagatccgcggcgcgggcagcctgctgggcgccgagcagtcgggcaacatgtccgcagtgggcttcgacctgttcgcgcagatgctgaaccaggccgtgagcgccacgcgcgaaggcgacctcaaggccatggacgcgctgccgcccgcgctcagcgatatcacggtgaacgtgccggggcacacctacctgcccgaagagtacgtgccggacgccgacgaacgcgtgctgtggtatcgcaggatagcctcggccgccaccgagcaggccgtggaggacgtgcgtgccgacttggccgacaagcgccccgacatgccgcaggcggcgaagaacctgttggagaaggcgcgcatcaaggcctacgccaacgagcaccatatcaagaccgtgtcggtgacggcgggcaagctggtggtggagcccatcgacgtgccccgcgacaagatgacgggtctgcgccgtgctggcggccgctacctggccgacaagcgcaagctgtcgctgccgctgcgctacttcaagctggacgaaggcgacaacctcctggcccccgtagccgagttcctggaggagctggcgaaatgagggaagggatcgctgagggcgcggcggtgtttcggcggcggcatctgcggggcgtgctgtgcgcgctcacgggcgcggggctgtgggggttctcgggcgcgtgcgcccagttcctgctggcgaactacgacataacgccctcgttcatcacggccgtgcgcatgctgggcgccggggcggtgttcctcctggtgctgctcgtgcgcaaccgcgcgcagcttgcggctatgctgggcgaccggcgcacgctcggtcagctggccgtgttcggcggcgtggggctgttcctgtgccagatcacgtacaccatcgtgatcggctacacgaacgcgggcaccgcaaccgtgctgcaaaccaccggcatcgccttcgtcatgctgttcacctgcgtgctcactcgacggatgccgcgggggcgcgaggtgactgggcttgcggccgccgtcatcgccacctggctcatcgccacgcagggtgaccccagcgcgctgtacctgccgctcatgggcctggcgtggggtatcgcgaacgggctgtcggtggcgttctacatcatgtacccgaagaagctgttcgcccgttggggaagcttcgcggtcacgggcatcggcatgttcatcggcggtatcgtggccgcagcggtgtacttcagcggcgtggcgcttggcgagccgctcgcgctgccggcgctcgatgctgcaggcgcggccgtgttcgcagcgttcgtgctagtgggcacgttcgcggcgttcgcgctgtacctacacggcgtgtcggtggtggggtcggtgcagggaagcctgctgggcgctgtcgagccggtcagcgccacgctgttcgccacgctgtggctaggcaccgcgttcaccggcgccgacctggcggggtgcgccctcatgatcgcgatgattttcctggtgacaggggagaagccgaacgtccggcaagacggcgcgcaggcggttgaagagagtcactcggcgaagtcgtagtgctttcggtagtacacgtacgaggcgacgatgctcgcgccggctgccgccaagaggatggccaccatggcgggcatgaccaagttcatgggcagtgcgagcccggctacgacggtcagcacgcccgaggcgatcatcgcgtacccgccgaaacgctgcgatttgcgccacacctcgtcgttgctcaggctccagggcgtgcgaaggccgaaggcttcgtttcgatcggatttcggcatgatgttgccgcagatgacgaaggcgatgcccgcgacgagggcggcgcctcttcccacgttgaggtcgagtgctgcgaacggcgagccgctgctggagagcccgtccgcgaacacgaacagcgagaacaccgccatcagggccaagagcacgacatcggccttcaagagcttgtcgccgtcgtgcgcgtcgcttcgtttcgcgatgaacggaagccccaggccgaacgcgagcgccagcgcgggaaaccatagatgctcgtacttgcttccgatgcggtccgcctcgccgctcgcgccgaaatgcacggcgacctggtcgggcgcgagcacgagaaacgccgcgtccacgacgaggttgaggacgatcagagcgtagataaccttacggatgttcttcattctgcctgctccttcaaattcgcgatccaaagcagcgtctcttccagcacggacgccttcaactcgtagaagatgtacttgccctcgcggtagtcgcgcacgaggccggcgttcttgagcaccgagaggtgccgggacacggcgggtgcggagatgtcgaacaggtcggcgatgtcgccggccggcatgcgtccgtgcttgaggtgctcgaggatatccctcctcaccgggtcggacagcgctttcaacgtctcctggatgcccatcgtccttctccgcaatatttaacaatatggttaaatataacgctttgcagctggaagggcaagcggggagcggggcgtgtcggttgctgggctcaaaacggcgcccatgacagtttcgaagcgcatctccttggcgttgcgtcatctggtatgagcaaagccccagatggcgaaaaaccagcgtacctcttcttcggtcaaaccggccctcgtagtgtcatgggagtcgatttgcgtccaaacctcgagatgctctcggtagccgacgcacgctttccaatcggatttcacatcggcgcaatggctcgcggcacgccggcgaagggcgccacgcgtttcgcgaccgtcttcgttttgtgcgcgttcgcctggacgacattttctcggacgccgtctttgctacgatgatcgggatcgatcgggccggattcgatgctgcgcgaatttgcgccgcttttgctctatcggcccgggatacgacgaggaaggatgcgcgatgggtttgttcatgacgcttgaggggctgacggaggaggacgccgtgcggctcgcgagcgaagaggccgtgccggcggatcgcctgcgggtgttcgacctgcactgcgacacgctcgaccggctggcgttccacggcgacgcgtcggtgccgggcggcttcgccgcgcacgacgcgcgcattcccgcgcaccgcatggccacgctcgccgacaacgatgcccatgtctcgcttgcgcgcacgggagggttcgcctggtgccagtgctttgcggcgttcatccccgacgaggtgcgcggcgacgaggcctggacgctgttccggcgcgtgcagtccgtgctggagcgcgagctggaacgctgcggcgataagctggcgcaagcgcgcacgatagccgaagccgacgccgctctcgccgcgggcaaaactgcagccgtgttcaccgtggaaggcgcatcgtttctggaggacgacggcgcagccgagggtcgccttgacgcgctggccgacgcgggcgtgcgcatggtgacgctcacctggaacggaccgaacgcgctgggcagcggcaacgacacgagccacgggctgaccggcttcggccgctcatgcgtgggcgagctggagcgccgcggcatcatcgttgacgtatcccatctcaacgacgcggggttcaaggatgtgtgcgcaacggcgaggcgccctttcgccgcctcgcactcgaacgcgcgcgccgtgtgcgggcatccgcgcaacctggccgactggcagctgcgcgagctggccgattgcggcggcatcgcggggctcaacttctgcacgcagttcctgaccgatcgcctggccgatccgacgcgcgacgacgtgttgcgtcacgtcgaccatgtgttggagacggcgggcgaggacgtgctggcgttgggcagcgactacgatggctgcgacgtgcccagctggctggaaccgtgcgaccgcatcggcgcgctgcacgagctgctggcttgcgagttcggccgcgacatcgccgacaaggtgttcttccggaacgcgcgcgatttcttcgagcgggtcgagtccgtatagcggcccctgtcatcctgagcgtaggcgcgcagcgccgaagtcgaaggatcccgtgcggcgatagctggaagtctcacggttggcgccgcgcgcgatccttcgactgcgctccctgcggtcgctccgctcaggatgacaggccgttgcgcttcgctcgcctagaaaagccggcagcctacgactgcgagcgcatgatggtttcgtgaaccctctttacgagtctgatatcgtacttatactttctcgagtacgaaatcagactcgttaaggagcgaagcgagacatggatacgcgcaacgaccgtgcgaatcggaaatacaacaacctgttcaggctcgagaacgagctgtaccacgacatagccgtgaagatgggactgtccgacagcgctttcggtatcctgtactggctcgacgatttgggcgacggctgtctgcagcgggacgtgtgcgtggcgtcgggcctgaccaagcagacggtgaactcgtcggtgcataagctcgagcgcacgggcttcgtggagcttcgggtggagcaggggcgcggcacgcacctgcaccttaccgaggctggtcgcgcgttggtggaggagcgcgtccggccggtggcggaagccgagacggccgcgttcgttgcgatgggctcgcgagacagcgaagagctgctgcggctgacccatctgcatcttgagctcctgcgcgagcaggtggaagctctgccgtacccggacggacggtgatcgtcgtggccatcaagctatccgaccatttcacctacgggcgcctcgtgcgcttcgcactgccctccatcgccatgatgatattcacgtccatctacagcgtggtggacggcctgttcgtgtcgaatttcgccggcaaggaggcgctggcggccgtgaacctcgtgttcccgctggccatggcgctgggctccatcggattcatgctgggcacgggcggcgccgccctggtggcgaagacgatgggcgaaggcgatgccgagcgggcgaaccgcctgttctcgttcataacgatcgcggcggcggtggcgggcgccgtcttgatcgcggtaggcgccgcagcgctcgagccggtgctgctccttttgggcgctcaaggcagtcttttagagcaaggccttctgtacgggcgcatcctgctggtggcgttgcccctgttcatcgtgcagaacgtgttcctgagcttcttcatcgcggcggagaagccgcaggtgggcttcgcggtgacggtcgcagcgggtgtgacgaacatcgtgctggactacctgttcatcgccgttttgggctgggggatagcgggcgccgcggttgcgaccgcggcgggccaggcgcttgccgcagcggtatcggtcgcgttcttcgcgcgcagcaagacgagccgccttcgcttcatgcgcccggcggtggacttccgcgcgctggggacggcctgcgtcaacggttcgtcggagctgatgaccgaggtggccgcgtcggtggtgagcatgctgtacaactaccagctcatgatgctggccggcgccgacggcgtggcggcgtacggcgtgatcatgtacgtgaacttcatcttcacggcggtgttcttcggcttctccatgggaacagggccggtggtgagctatcactacggcgcgcagaaccggaccgagctcaaagggctgttccgcaagagcttcatactggtgggaaccacaggcgccgcgatgttcgccgcctcgcagctgctggcggcgccgctggtgagcgtgttcgtgggctacgatccggagctcgccgccatgacgctgcacgggttccgcatctacgcggtggcgttcctcgtgtgtgggttcaacatatacggctcggcgttcttcacggcgctcaacaacggcaaggtatcggcgctcatcagcttcatgcgcacgctcgtgttcgaaacgtccacggtcatgctgctgcccatcgtgtggggcatcgacggggtgtggagcgccatcatcgtggcggaggcgtgcgcgctcgtgctgacgatgttcttcctggtgtacctgcgcaaaccctacggctacgcgtagggtttgcctgtccgtccccctatctcgcggaagcgcgaggagccgcggctagcgatagcaggtggcggtcatcttcgcgatctgcttgccgaggtcgtcctcgaccgtgacggtgtagaatcccagatggcggcccggcttgtcgcagacggccgtggcggtgagcgccgcgccctgcgtggagcggaagaagctgatggaagagtccaccgacacggtgggctcttcgccgatgttgcagcatatcgccagcgcgaagtcggccagcgtgaagatggccccgcccatgacgttgcccatcgcgttgcggtgcacgtcggccagctccatcgagcatacggcgcgcccgcgctcgcccgacacgacgcggcagcccgccgcctcggtggcgaagcgatcgttcgcgaacacggcctcgatctcctcgagcgtgggatcgtcggaaagcatcgcgcgcctcctattccgccggcgtggcgacggcggcgaacagctccagccattcgccgtccttcaccgtgaccgtctgggtgccgcctttcaggacgtacttcgtgtcgatgatggtatcgccgtcgaagttgaggctgttcatgacgtaggccgcactgtcctggtcggcaacggccgccgcctcgtcctgcaccgtgatggcgtaggcgcccgccgggatgtcggtgcccacatggtacagcccgctcttgtaaggcgcttcgggtttgaagttggcctggtcggccgggtacatgcggtcgtcgcccgcgcccatgaacacgacaaggtcgccttcctcgaggtctgcgaaatagttgccgaaatacgtgaaaaccgatttcacgtcgtagccgcccgacgaaccgttgctcgcgaacacggtgaagtagccttcctcgtccatgctgccctcgaagaagtagcggcccgcttcgatgtcctggcctgcgcccacgcggtacacgcccgaggagcacttaccgtccgcgatttcgctcggcaggtcgccggcggcttccttgatggcctcgtaggtgtggtaccccgagccgttcgagttgccgccggagctgccgtcgaaaccgtcgaaggggaagctgtagccgtaatcatcgaagaggtaggaacctccgtattcgtacgggctgccgtagcggtcgtccagcatgacggcgcacgatacgcagcccacgcagccgccgatgcccagcaggagcacgagcaggcagcccgagagcacccatggccacgcccgcctcttcggctgcgcgggctcggcggggtagggcggctgcgccgggtagccgtacggaggctggggtgcggcaccgtacggcggttggccgtaaggttgctgcggggcttggcctccgtacggcggctgcgcgggctggccatacggaggatggggcatgccgtaggggggctgttgaggttgcggctgctgaggagcgtacgcattccccggcagcggagggggcacgggagcgccgcccgtcggggcagcgggcgggttctgccggccgtcgaggccgccgggctcgttccggtcgtcgcgttcgtcggcgggttgctcgggtgcggtcatgcgatgctccttgcctcgagggctaatcggtcgggggttccgggttctcgtcttcgtcggggaggaatacggccgcggtggcttcgacgagctcgatcgcctgctgcgggcacgcgtccacgcacaggccgcatccgatgcagtagcgcgcgtcgaaggacagcttgccgttctcggggctggggaagcgcgcgcccgtggggcacgcggcgacgcagtccagcgagttcgtgcagcggctgcgatccgtttcggacagcaccacgggcacgcgcgccgcgatatccgggttgcggtcgatggcctcgagcagcagctggcgcttcggccacatgacgtgcttcgtgcggccctgcggaacgaagtcgttgaattgcacgccgtccacgaggttgaggcgcgcccgggctcgtgcgcgctccttgcgctcgtagaactgctgcagcacgtcggagttgcgcaggcggcgcttgcccgacgcgatgtctcccacgtcgctcacgaggttcgtgaacgcgctgcggcggtcgacgccctcggggttcgccaggtcgcggaccaggttctccttctcggggatctcgtcgaggtagcctaccttcgcgccgctccactcctcggctgtctccacggcgtgggcgtacagcatctcgcccatctcgcccgcccgctcgcagtcggcgcagtaggcgaggtcggccgcgatgcgcacggggatgttctccgtcagcacgagcgtccagaactcgggcgacaggcatgccaggcacggcagcaccaccacgttggcggcgggctccagaccgggaaagacgttttccttgcaggtgagcaccacgtcctcgccgcgcagcgcgatgcggcggatgcgcgcgtgcacgtcgatcatcgtgacgcgcgaggacgagaacgcgtcgcagatgcctaagcagatgccgcagcgcgtgcagacgtccgcgtcgatggtcgggcggccgtcctcagcgaagccgatcgcgtcgtgcgggcaggccagcgcgcagcggctgcagtcggcgccgcgcacgcgggtgcagtagtcgcgcagcacgacgatctggttgggacggccctccgtatcggcggaggggccgtcggcctgctcgggcatgttgtcaggggcgtcagccaccgaacacctctttcgtcacgtagtcgatgcgggccagcacgtcttcgcgggacagcagctcgatgctctcgaacaaaggcggcgacaccatgttgccgcacaccgccacgcgcaacggctggaacagcagcttcggcttgagctccaagcgctcgccctcggcgcggcacgcttcctgcagcgcttcggcctcccaggccacgttctcgtcggccagcacgccgcggcaggcgcgcaaggcctcgtcggcgcgcgcgccctccttcttcagcaccttgttgacgctcttctcgtcgagctcgcgcacctcggggccccagaacatataaggcagtttttcggcggcatcggttaggcgcgtctcgcgttcggcaagcaggggatagagccttgcgtaccattcggttcgaacgtcgatgtcggccaaagccgcccgatgaaccgaatcgtcgggaagtgcaagaggagagtagacgggttcgccgcgaagcgattcgctgacttccgcggacggttcggcccgctctcccgtcttgccgacaacccgagcctcggcaagccatattttcgatgcctgcacccaggcgttcgctcccatctccttgatgtactggccgttcatccaatcgagcttcgtctcgtcgaacacggcgtcctttttcgtgacgcggtcgaggctgaagcgctcgcatagggttttgcggtcgatgagcgtcgtttcgccgtccagcgaccagcccaggagcgccaggaagttcaccatggcgtcgggcaggtagccgcgctcgcagaactcctccacgctggccgcgccgtggcgcttcgacagcttcttgccgtcggggcccaggatcatggacaggtgggcgaaggtgggcacgtcgaacccgagcgcctcgtagatgaggatctggcgcggggtgttggacaggtggtcgtcgccgcggatgacgtgcgtgacgcccatgttcgcgtcgtcgcacaccacggcgaagttgtaggtgggggagccgtcggtgcgcacgacgatcatgtcgtccatcacctcggccgggaagctgacgtggccgtacacggcgtcgtcgaactcgatggccccgcgctcggcgggcacgcgcaggcgccacacgtgcggctcgccggcctcgatgcgcctggccgcctcggccgggtcgaggtcgcggcaggtgcggtcgtagcccgcgtagccgccctcgttcgcctcggctgcggcgcgcttggcgtccagctcctccttcgtgcagaagcaggggtacacgctgccgcgctgcttcatctgctcgagcgccgcggcgtaggtgtccgtgcgttgcgtttggaagtagggtccggcggctccccccacctcggggccttcgtcccaatcgagccccagccacttcattgcgttgaggatgacctgcacgttctcctcggtggaacgctcggggtcggtgtcttcgatgcgcaggatgaagtcgccgcccatggcgcgcgcgaacgcccagttgtagatggccgttcgtgcgccgcccacatgcaggcggccggtgggggaaggtgcgaagcgcacgcggactttcttgttctcgtcagtcatggttgcggtgatcctccagattggatgatttctcgtttcaagtcctcgaaacagggtttcgggggcgaatgccagtatagacaacctggctcaagccgcaaaccgcgcgcgccgcatcctcatcaaaatgctcgaccgccgcgctcgcggcgcattggcgcgcgcttcaatgcgggcgcgtcgggcctcggtcgtgtcgggccggaatcccgcattccgggtggcggaggagccgcccgattggccccctgccgcgaaaaaccgcgttttctcccatgtgccggacttatgtgcacctctgctttgggaaaacgccccttgtaggaggtggtgcgaccctctgtttgagaaaaccgcaggtcagaaattaaccaagtcatactttttccttttcggtgccctgagaggtgcgcataagtcgggcacatggtgtttttcggcccttttcgatgacgcgagcgcgcacaactcaaggacttgtccccgtttcggtttccgtgcgctgcgcaaggggtgctggggagaggggcggggcggtcgcctttcatagcgctcgcttcgcctatcgctgcaccagcaagcggtggagctcgatgcgacggtttgcccatgcgtcccagcccggtccgaacttcttgcccagggcgctggccaccagcagcgcgacgcgttcgaattcgtagtagtttcgagcttgcccccaagtgagggtcacgactcgtgtgcccaggtgctcgatgccgttgcgccggatggcgtcctcggaggcctttcggtcgcctcgatggtgcttgtcgctgtcgtattccacggagatgttcgcgcggggccaaaacagatcgggaaggtacgccgattgcggcagcgcacggcggtttttcctcgtcacttcgaaacgcgggttcagctgcggtttctccaggcctaagcctcccatgcgcggatcgaataccatggtttccgcgatgtcggtctccatcggcgacagcgagttgtcgcacgcgtagcgcaaggcccgcttcacgtcggcggctccgcgcactcctcgagccttgtcggcgaagcgctcgatgccggcgacggtcgttgcaggcggcagctcgacggcgtcgcctcctcggccgtcgggcaggcggtatcgtccgcagagctcgtacaggaattcgacgagcaaggggaacggcgtcgacggcgcgatcgacaggcaggtgagctcgggcgaggcgaccatcacgcggcttgacagcttgacgaaggatcgctccggcaatcgatgcgagcaaacgtggagcttcgtcctcttgcatcgacggcgcgacgacgcatcgggcgcgaggaggtggattggctcggagagccatccgacccccgcctcctcgagggctgcgaggtccgaggcgctgaacggaggcgtctcgcgatcctgtccgaacggcgtggccgccctcgcacgggtcttcgcgctcggatcggctctcctccagtattcgacggccggcgcatcggcaaggtacaaggtcatgtcgctccttcccggtggggccgactgcgaaacgaatgacatcttaccagttcaaatactaaaaatataccgatttgagcgctggaaacgcgctgggttttggctagatccgcgtagcatttccgctagatccgcgtcggttctgcgcggcttcgcaggtgggaggggcgccctacgcccgtttgcggcgcagcaaggcgccgacgacgacggatgcgatggacagcagacccgtcgcagcgagccacaccgcccccatccctatccagaactcgggcgggtacatggtgatgagcagcgagtcgtaggagaacgtccacgtgccgttcgcgaagaacagcgagtggaaggcggcgaagaagccgttgaagtccgcgaccacccatgcggccagaagcgcgaacaccgcgatgaccgcgatgcccgccgccatgagcacgccgccgagcgcacggcgccccacgcggacggccatgtgcgcgcaggctgctacggccacgagcgcgacgacgatgagcccgatgtgcgcgcccgccacgacgtggtacacgtcgtcgaggtgcgacagggcgtcggcgggcagcgtgtactcctcgggcgcggcggccagctcgtcaggggcggcgtcggcgtagggggtgcccgcgctctcgttgatggcgtgcagcatggagaacacggcctcgcggtcgttcgaccctacggtgtagtcgcgcgtggcgacggccgcctgcaccagctcgtcgtgcgagaacggcgtgcccgggttgccgttgccggagaacgcttcggccagcatctcggtggtctgcggaaacgccgcgcatgcggcgaacccggccgctacgagcgtgatcgccagcgacgcggcggccaccacggcggcgagcttgttcatcagatcggtcatctctcgtctctctcttctcgcgacgttcccgcggcatgctgcgccggcagggcgcccccgccccgccggcgccgaagttcctagtccacccagatcgtggcggcggtcatgccctgcatgtccttcgagatcgtgggcagcggccccaggcggctgaacacgccctggaacacgccgtcgtacaggtacaatccgttcaggttgttgtacagcttcggggcgtcggacacctcgtcgtcggtcagctggtcgatgcccgtgtccggcggcagcgtctcggttttgaaggggcggatgtagcgctgcacgatgaacggggagcccgcgcgaccgttcgcgaacttgtcgatgagaccctcccattcctcttgcgacacgtagcagccggcgtacacgtcgtcggcgccgtagtggtcggtgggcttgatgatccactcgtccttgttcgcgcggatctgcggcacgttgatgtagtcgtcgtccagaaaggccgtcatcggcacggtctcctcgatgaacgagatctcgtcgccgtccaggaactccagggtccgctcgtcgaacagcaccttgaatatctgcttgtcgtgtacgatgtgcccggcgaagctgccgatgagcgccaccttctcggcgcgcaccgcgttgagaagctcctgggagtcgtcccagtggtcgatgacgtcgttggtcacgcagcgccgccagatggcgtcgatgcgctggccgtccttgtcgtgcagcgcctcgccgtcgaaggaaagctcgcgcacgtcggccaccacgcactcgacgccgcgctggtggaacaggtcggcgtagatgtggaactcgtccaccacgccgttctccaggtagtcgcagatggcgatgcgcgggttctccacgcggcgggcgtaggtggcgtagatgtccaagaacgcctgcacccacgactcgaacagctcgcatccctccacctggtggcggctcgcgaactccttgaacgtttctgactgcgccaccgacgtggtgatctcgcggttctcattcatgcccgacgagccgtcggcgttgaactcgcagaacttcacccggtagtcgtcctcgtccaggaacgtgtccacgcgggcgaacggcagaaccgagtcgtagccgcgcggcagcaggatgagctcttccagacgcgggtcgaagtcgaaggcgcgccggtactcggggtcggccaggtaccgctcgatgaccttgacgaggatgcggtgcgcggtttccgccgtctctttcatcgtgtcgtaggtttttctattgaacaggcgggggatgaacgagcacgctaccacgcggtggtgcacgatggccgtggagctctgcatgtagtcgtaggcggcgcgacgtccggcgacgtcgccgccgagcgcgtccatgatctggaagtactcgcgcgtgtagtcggcgttggttggcatggcgatcctttcgggacgccgctcccgaagcggcgggacgtgctcggggcggaggctggatttcaaccaaaaagtctaccacgagccgcgcgccgcgatcggggaagttgccgtatcgccacatgaacggcaacgtcacggaatctttccgggctcggtcgaggggcgggcgagcgcagccgacggggcgttgccgtcgtgcggagcgcgcttcgccggggcgcgcgccgcatgcgaacggcgcggtcgtgggggttgcgcgcatgcggggttttctctattgcgcggacggttctttcggggtaccatcggcaaggtttcacggggattccggcttttcgcacggttctctgttttatcaagagtcgggggagagagttggctctgtgatcccgacaccaacctggcggatacgccaaggtggtccggcctacagcgatgaaggaggaacgtatggccgaagaatgctctacctatttgttcacgtccgagtcagtcaccgagggtcatcccgacaaggtgtgcgaccagatatccgacgcggtgctcgacgccatcctggccaaggagatcgagctggccgccgccggctacgtggctcccagcgggcagcccgccgatcccgcgcaggtgcgcgtggcctgcgagaccatggccaccaccggcatggtcatcgtcaccggcgagatccgcacgcaggcctacgtcgacgtgcccgccatcgtgcgcgaggtgctgcgcgacatcggctacgaccgcgcgaagtacggcttcgactgcgacacctgcggcgtgctgaacgccatccacgaccagagccccgacatcgcgcagggcgtcgacgagagctgggaggcccagcacggcctggacgagggcgacccctacgagcgcgtcggcgcgggcgaccagggcatgatgttcggctacgcctgcgacgagacgcccacgctcatgccgatgccggtgtatctggcccaccgcctggccgagcgcctgaccgaggtgcgcaagaacggcaccatgccgcttctgcgccccgacggcaagacccaggtgtccgtgcgctacgagggcggccgccccgtgcatgtggagaaggtggtcgtgtccacgcagcatgccgaggagatcgcccacgacgagctgcgcgcccagatcgtcgagaacgtggtgaagccggtgctcgagcgcgagggcgtggcgctggccgacgacgccgagatccacgtgaaccccaccggccgcttcgtggtgggcggccccatgggcgacgcgggcctcaccggccgcaagatcatcgtcgacacctacggcggcatgggccgccacggcggcggcgcgttctccggcaaggactgcacgaaggtggaccgctcggcggcctatgcggcgcgctgggtggcgaagaacgtggtggccgcgggcctggccgcgcgctgcgaggtgcaggttgcctacgccatcggcatggcgaagccggtcagcgtgatgatcgacacgttcggcacgaacgcggttcccgaggccgacatcatggccgcggtggacgcgacgttcgacctgcgtccgggcgccatcatcgacgcgctcgacctgcgccgccccatctaccgcttgacggccgcctacggccacttcggccgcgagcttcccgagttcacctgggagcgcaccgacaaggccgacgagctgcggaaggcttgcggcctggcgtaagcgacaaccgtagaagcttgtggcgaaccgcccgttgcgatcgcgcagcgggcggtttcgcgtttgcggcgcgcgggacggtgccctgaggggggatcggcgcttcgcgtgaagcgtgagcgttcggctaggcgcttggcaggtctggaagggtttctgtcccgcgttctctcccgcgtgccgtttcgtgctgccagccgggctcttcgctgttgaaccagggttagcagggaaagcggggatcgtgggcgcgaatcgacgtccgtgacaatttcgggggtcgtttcgagccgtttcgagccgttcgcgccgggtttccgggaaggcgctcgacatatgcccaggtcgctgaaactcggaaccgtcgcaatatgagttcgccgaaggcaacattgtcatggtggtcgattcgtgcccacggatcccgtcgcccgccgcccggccgggagcggcgccgcccggccgggccccctccgatcccggctcgacggcgaaggatcgatgacaactcaggtttgacggcgaaccgggctcgaaatggcgaaaagtcggcgaattcggaagagatcgtgcgtttcggtcgagctcgttgcgcgatatcgaaagtgatctttccggtgacctgtccttattcgacaggagctttctctgtgcgcttgaggttcgcttaagaacttccgaatccgatggtttttcgtcaacggtagcgtgttccgcggttaaaccaagattgacatagcccaggtcggctcgtccctcgaaaactcgccggcggttcggaagccctcttcggccatcgaccaggcgctcgtctcgcccgatcgccagccgcccgataggggaagcggcgtgcggcggtgcatgtcgatcctggtttaacaacggatagcgtgttcggctgcaggggcgaacgggatgccaagggatttcctgcggtggagcggtagggttcctgcggcagctcggggttgggatatactgggggcatgaaactcgcatccgtcatcttggacatacccacgcaggcgctcgacgcgccgtacacctacgccgtccctgaagaagcgggcgaccagccgatcgaggtcggctgcgccgtgctcgtgccgttcgggccgcggcaggccgtcggcttcatcatcggcatcgaggagcgcgccgaaggcgattggcccgcaggtctcgaccctgccaagctcaagggcatcgtgcgcgcggtgagccgcccgtacttcgacgaggagggggctgcgtgcgcgcagtggctctcggaacgctacatcgcgccgttgtcgtcgtgcgtgcgcctgttcacgccgcccggcggcgtgccgcgcatggtgcgcgcgcagggaggctactggcgtcttgaagagccgacggtgggggaggtcgacgaccgctgggtggtgccggggcctgcgctcgcggacttcgagccgcgcaagaacgccgtgaagcaggcgtccatcgcggccgcgctcgagcgcggcgagctgcgcgtggccgagttgacggccgagttcggcgcggtgtcgtcgcccctcaaggcactggagaagcagggcgtcgtgcgcatcgagcaccgccgccgcatgcgggggatggcggagggctccgcaggttcggcgccgtcggccgactcggccgccgtgccgtcgttcaccccctcgcccaagccgccgctgacgcgggggcaggctgatgcgctcgcggccatcgacgcggcgcgctcgcgcggcgcgggcgaggtggtgctcgtggacggcgtcaccggctcgggcaagaccgaggtgtacctgcaggccatcgaggagacgctggccgccgggcgcacggcgtgcgtgctcgtgcccgagatatcgctgacgccgcagaccgtggcgcgcttccgtggccgcttcggcgacctggtggccgtcatgcactcgcgcatgagccagggcgagcgctacgaccagtgggatttcatccgctcgggtgcggcgcgcgtggtcgtgggcgcccgcagcgcgctgttcacgccgctttcgaacctcggtctcatcgtcatcgacgaggagcacgaaggttcctacaagcaggacagcgcgccgcgctaccatgcgcgcgacgtggctgtgtggatggcgcggcgcgccggggccgccgtggtgctgggaagcgccacgccctccattgaggcgctgcacgcctgcgcgaaaaacccctcatggcatcaggtgagcctgcccgagcgcgcgaacggcaaaccgttgcccgaggtgcaggtggtggacatggcgaaggagttcagcggcgggtcgcgttcgatgttcgcgctgccgctggcccgcgcgctcgaggaggagctggccgccggccgcaaggcggtgctgctgctcaaccagcgcggcttcgcgaaattcttgctgtgccgggaatgcggtttcgtgcccgagtgcccctcgtgctccacgtcgctcacgtaccacgaacgcggcaacttcctgatctgccatcactgcggctatcggatacccacgccgcccgtgtgcccggaatgcggcagcccctacctcaagaagttcggcgcgggcacgcagcgggtcgaggccgagctgcgcgtgctgctcgacgagatgcccggcgtggacccgggggtgcccatcgtgcgcatggacgccgacaccacgagcggcaagggcgcgcaccagcgtctgctcgaggagttcgccgccgccgacgccgccgtgctgctgggcacgcagatgatcgcgaagggcctcgacttcgaggacgtcacgctcgtgggcgtcatcaacgccgacaccatgctgaagctgcccgactaccgcgcctccgagcgcacgttcgaccttgtggagcaggtggcgggccgcgcgggccgcgccgagctgccgggccgcgtgctggtgcagacctacgaggccgacgctcccgccatccgcgcggccgccgcctacgaccgcgccctgttcctgcgcgacgagctgccgaagcgccgcctgctgggctacccgccctacgtgcgcatggcgaacgtgctggtgtggagcaaggacgagccggccgtgcgccgcgtggcggccgagctgcaggcggcgctggaggaggcggtgcgcgacttcggcggcgacggttggagcgtgctgcccgccacgccgtgcgtgctggcgaagctgcgcggcacgtaccgctggcatattgtggtgaagtgcccggctgacgccgacctgtccgatgcgctgctgcccctcttccgccgtcgcaagcccgacagggatgcgaacgtggccgtggacgtcgatcccgacgatctgctgtagcgcgctcgcgccgcggcttgctgacgttcggcctaccagccctccatgaaccaggcgaccgtgaacgccacgcgctcgccccaggccagacccgcgatgtcctcgtccgcaatgggcgcgcgcagcgaggatcggttcgcgtacgcccagtcgtacagcgctgcggaatcgacgaatcgctgcggcttcgaggacgaccccagcaccacggcgtagtacttgtgcccgtctccgcggttcacggccgacgccgcgcagggcccggcggccaacgtgtagccggtcttggccgcgcacgcgcccgggtagctgcccagcagggcgtcggtgttctccagcgccagcgtcacgggcgccccgtcgcgctggaccgtgatgtctgcctgcgagaacccgatgttcgctcggacgaggtcgatctgcatggccgcgcgcagcatcgtcgccacgtcggccgcgcagctgtactgcccctgggcgaacgcgtcgaagtccaggccgtgcgggttcgcgaagaacgagttctccagccccagctcggccgccttcgcgttcatggcctcgacgaacgccgcctcgcaggcgtacgcgtcgccgcccgacccctcctgcgccagcatccgcgctccggccgcttgggcgatggccgacgccgcgtcgttgcccgaagccgtgagcagcgccttcagcgcgtcgtcgaaggtcatagagtcgccttgcgcgagcccggcgctcgattcgccgacgctggcggcttcgggcgtgacctcgatcatcgtcgatgcgtccagccagtccgccgccacgatcgcggtcatgatcttcgtcagcgaggcgatctgcgcggcgtcatcggcgttgcggccgaaccacagcgtgccgtcctcgtccatgagcgcggcacaggatgcgtcgaagtcgggaagccggtcgggcggcaaggcgcgctcggcggcgctgagacggagcaccatgtcgtcctcgttcacggaaccgaaggcggccgcgagcggcaggcacgccaggaggccgaccagggtcaggcaggcggctgcgcggagatggcggcgtcgggcgttcatcggctgctcctcgggtgcgtgcggagggttcgtctgcgtaacagtatacgcgctggagagcgtcgcatgggaagcggcttaaaacggttttatcggttcttgcgggcctccgttcatgtcggatcgtaggttttcggcaagaccgtggtatcctagctgatcgtgagacgttctcgcgggtgtcgaaggagggatgggctgtgggaaagagagcggcgcgttgcgtctgctcggcgatggccgcattgctgatggcaacaaccgtcttcgtcgttcccgcggcggccgatgtcggcggttcgcgggatgcatccgaggacgttcgagtggtgcgcgtggcgttccccgaggtcgaaggcatcagcgagaccgatgccgacggcgtgcgctccggcatcctctacgattggctcgcggaggtttccaagtacaccggatggacctatgagtttgtggacggcgatgtccaaagtctcatgaaacggacgtctgcgggagagatcgacctcatgggcggcatgtactatcgggagcagctcgtcgattcgttccagtattcgaacttcgccatcggtgcgaaccacgccctgctcatcagcctcgaagagaacgacgatgtcgtcgtcttcgactctcgcacgctcaacggcaagaccatcggcgtgttcgagaacgctaccgagaagattcgccgtctcgaaaactacctcgatttcaacgatatccactgcatcgtcctgccgctcgactacgatgcctactcgaaatgcctggacgacggcaccgccgacgtggtgctgggcggcgacgtggacgtcaccgaaggccgcagggtcgccgccgagttcgacggcgaaccgtactacatagccatgccgttcggaagcgatctgaaggacgatctggatgcagcgatgacgtcgatctacacggcgaatgccgagttcgcgaacgagctcgatgcaaagcacctgccgtcccgccgccaaagcgccatcaagttctccgaagccgaccgtgcgttcatcgacaacgcaggcgagatcagcgtggccgtgatgcagggccgctacccgctgtactacgagcgcgacggactgtaccagggcatcgtgaaggatgtgctcgacctggtcaccgagcgcacggggctcgcgtttcgcctcgtgcatgccagtacgtaccaagatgccgtcgacctggttaaatcgggggaagtggacatgatgggcggcttcttggacgacggctacgcggcggacggccaacagctcgccatcaccgagagcttcgcgtcgctcaacgaggtggtgttccgcaacaagctggcttcctccggggaaacggtcttcgcccagatcgaagggcgtgatggcaccgacggcgtggaggcttccgaggtcgtgcactaccgtacctacgaagactgcctcgaagcggtgaactccggacgcgccgacgccaccagcatgcccgtcgcgttcgcggaaggcctgttcatcgaccactcgttcagcaacatcacgccggcaacctccgagcatcatgaggcgggcctttcgttcgccctcgccaagcccgtggacacggagctgtactcgatcatgagcaaggcggtgaatagcttctcgcaggacgagctggacaccatcgcgtcgcacaatagcatgccctcgttcggcaagcagcgcactattcaagcgctcgtctccgagaaccccttgctcgtcgtggcgttgagcctcgtgctgtgcctgttcgtgggcgctatagtcatcgtggtgtcggtggcgaaggtgcgcaaccgcatgatggagatgaagctggagaaggtggaggagatgggtcgggcgaagaccgacttcctctcgcgcatgtcccatgagatccgaacgccgatgaacgccatcatcgggctttcgagcgtggcgtcgctgtcgggggaagccacgccgtccattcgctcgagtctcgagaagatcaacatgtcggcccagttcctgctgtcgctcgtgaacgacatcctcgatatgtcgaagatcgaggacgacaagatgcgcatagagacggcgccgctccgcctgcgctcgctggccgagcgtctgcagagcatgttctttctccaggccgaggacaagggagtcctgttcgagacccgctgcgatgccgacgacgtcgtggtgggcgacgacgtgcggctgcagcaggtgctggcgaacctcttgtccaacgcgctcaagttcaccgatccgggggacgccatccggctgagcgtggtcgtgctcatacgcgacgagggaagcgcgcgcgtgcgcttcagcgtggaagataccggcgcgggcatccgcgaggaggatctcgagcgcattttcgtgtcgttcgagcaggcgtccgagaatcgccgcaacgcgcaggggacgggtctcggcctggctatcagcagcaacctcgtacgactcatgggcggaaggctggacgtgcagagccgcgtcggcgagggttcggagttcttcttcgtgctggagctgccgacggccgacgaggaggctttgggggacgaggagacccctgcggaaacggccgaccgatcgcttgcgggcacgcgcgtgctgcttgccgaagacaacgatctgaacgccgagatcgccgtggcgctgctcgacatgcagggcgtcgaggcgcggcgtgcggcgaacgggcgcgaagccgtggacatgttcgacgcttcggagccgggagcgttcgatttcgtgttgatggacgtgaagatgccgttgctcgacggcctcgaggcggcgatcgagatccgcgcgctcgatcgggaagacgctcgcacggtgcctatcatcgcgctcacggccaacacgttccaggaggaccgcgaggacgcggccgctgccgggatggacggcttcatccccaagcccttcgatgcccagcagctctacgagacgctgcgcagctacctgccgcgcaaggggtaggcccacggttgcggcgcaagttcgcgagcctcgcaaaacctgcgcaagcgtcatattcgtcagcaagatgacggaaaagtgtggtatattatttggctgtatctttgcgcctggtgcgtatgtatactcatgccctgcgcgcagtccggtcggaaaggaagatcacgtggcccaagcctcaagcaagcaagcccaagagcggaacaacgcggcggttgcctcgatcgaagccgaagacatcctggaggaagacgccctcgacgacgagcccgatgtggtcgacgccggcgacggactcgacgacgataagcttgaaagccccctgtccgatgacagcgacgacgaagacctgctcgaaggcattcctgaagaggagcttaaggcgacggtcgaggttcagctgcccaaggtggcgggcaagagcaaggtgcgctccgtgcgcaagcgcaatgccgacgccagcgtgaccatgctcacgggcgaccccgtccgcatgtacctcaaggagatcggcaaggtcccgctgctcacggccgccgaagagatcgacctcgccatgaagatcgaggccggcgtggccgccatggaggagcttgagaaagcggaagacgagggcatcgagctcgaacgccgcgagaagcgccgcctcggccgcatcgagcaggtgggcatcgacgcgaagcagcagcttatcgaggcgaacctgcgtctcgtcgtgtccatcgccaagcgctacgtaggacgcggcatgctgttcctcgaccttatccaggagggcaacctcggcctcatccgcgccgtcgagaagttcgactacacgaagggcttcaagttctcgacgtacgccacctggtggatccgccaggccatcacgcgcgccatcgccgatcaggcccgcaccatccgcatccccgtgcacatggtggagaccatcaacaagctcgtgcgcatccagcgccagctgttgcaggagctcggccgcgagcccagccccgaggagatcggcaaggagatgggtctgcccgccgagcgcgtgcgcgagatccagaagatctcgcaggagcccgtgtcgctggaaacgcctatcggcgaggaggaggactcccagctgggcgacttcatcgaggacgacgccgccgtggtgccgcctgacgccgcctcgttcagcatgctgcaagagcagctgtcgaaggtgctcgacggcctggccgaacgcgagcgcaaggtgatcagcctgcgcttcggcctggaggacggccatccccgcacgctcgaggaggtcggacgcgagttcggcgtcacgcgcgagcgcatccgccagatcgagagcaagacgctggcgaagctgcgccacccgtcccgctcgagcaagctgaaagactacctggaagattaaggttccggcggcctgacggccgtcggaacgggccgacgctgcgaaggaccccggcgccccgccttggcgcgatggcgaagactcgcgtacgcaacgtacgcttcgccttctccatcccgccaattcggaacaccagggtccttctcgctgacttgctacgccaacctgcggcatgcgaagattggatctgcgctgtatggataacgaaaacctcgaactgttcgctagctgcctgtccggtttggaggcgccgctcgccgaagagctgaagcgtctgggcatcaagcgcgtgcgccccctcggcgggggcgtcgcctttttctgcgacgtgcgccatgcgttgtcggcgtgcctgtggtcgcggctggcttcgcgcatcctcgtggtggtggggcgcgtgaacgcaggcgatgcgaacctgctgtacgagggcgtgcggcgcatcgcctgggagggcgtcatcgttccgggcgcgagcatgtccgtgcaggcgcacggcatgaacgacgagctgcgcaacacccggttcacggcgctcaaggtgaaggatgccgtatgcgaccgtttgcgtgagatgcgcggcgaacgtcccgacgtcgacgccgatcatgccgacgtttcggtggatgtgcgcgtgcgggaggggcgcgccacgatctcgctcgacctgtcgggcgaatcgttgtaccaccgttcctacctcacgcccgacgacggtcccgacgccccgctgtcgtgcgcgctcgcggccggacttctggcgctggcaggttggcgcacccgcggaagccgcggcgaggcgctggtcgatccggcgtgcggcgacggcttcctggtggtggaggcggcatctgccgcgtgcgacctggctccgggccttacgcgcgagcgctggggtttcttcggctgggtgccttcggatcctgacgtctggaacgagctcatcgacgaggcggacgagcggttcgaacgcggcctcgcgtcggccacggcgccgggcgcgctcgacggccccgcgtcggcaccgcccgatccggcgcatgtgcgcttcgcgggcgcgtccacgtcgtctccggccatagcgcgggcgcgcgtccacgccaagcgcgcgggcttgcgccaggccgtcagcatcgagcttgcggacgcgcagagcgtcgacgagttggtgtcgcgcgtgtgcgccgctgccggcagggcgcgcggcggagaggcggcctcgtgcacggtcgccagcgtgctgcccacgggcgagcgggcccagtccgacgcgcgctcgcaggctgacgcggccgcgttcgtgcgcgcggcttcggtcgctccggcgggctcgacgttcgccgtggccggcggcgagatcgtggaggcgcgctttggcgtcgcgcccgcggtgcgcgccgtgctcggccgcgaccgcgtggagaccgaggcgctcgtgttcgacaagcctcccatggaggccgtgaaggtggtcgtgcccgatcccgcgggcggcgccgagcatgtggtggaggtgctggagccgacgtccgagcagttcgccgcacggctgcgcaaaacggccaaggagcgccgcaagtgggcgcgccgtgaaggcgtgtcgtgctaccgcgtgtacgatgccgacctgcccgactacgccgtggccatcgacgtgtatccgggcgcgggcgatgccgagggcaacctgtacctgcacatcgccgagtacgcggcgccctccaccatcgatcccggcaaggcgcagcgccgctacgacgacgtgctggcgctcgcgcccgtggtgctgggcgtgcgccccgaccacgtgttctcgaaggtgcgccgccgcgacaagggcggcagccagtatcgcgactcgggccggcgctcctacgtcacccaggtgcgcgaggacggctatctgttcgaggtcgatctggccggttacctggacacaggcctgttcctcgaccatcgtctcacgcgcgagctggtggggaagaaggccgagggaaagcgcttcctcaacctgttcgcctacacgggttcggcgagcgtgcatgcagccggtggcggcgccaagagcactgcgacggtggacttgtcgcagacctacctcgactgggccgcgcgcaatatggcagccaacggcttcgagggggagcagcataccttcgaacgcggcgacacgatggcgtggatcaccgaagcgcgccgcaccggccgccgcttcgacctcgtgttcgtcgatccgcccacgttctccaactccaaggccatgggcaagcgcacgtgggacgtgcagcgcgaccatgtggagctgctcatcggcgtgtcgcgcctgctgtcggaagagggcgaggccgtgttctcgtgcaacctccgttcgttcaagcccgacgaggaggcgctggccaagtacggcgtcacgctcgaggacatcacggcgcagaccattccccacgacttcgaacgcaacccccgtatccataaatgctacctggttaaaagaacccagtaacccgtcttcctgttcctcgacgcggcgtacgggctgccgacggtgccggtgatggcgaaaaagcatcgaattcggaaatctcgcaccggctttcgcgggcgccggtcggcttccttttgcgaaacgcctggtcgcgcagtcgcctttcctgcatacattgtgccgagtgtgtccgaaaggacgcggcggtttccaaattcgacgtcttttcgtcattttcagcccgatgcgctgcagcgtggtagcgtcccgaaagttggtgtatcaatccgtttctggagggcgggcgaagcctgcccgagaaaaacggacatcgtctagaatcgtcaatcaccacaaaagacagattcgaaggaaggcgatgcccgctatggacactctactattcaacgaccccgaagtgaaggggctcgcgttcgcgatcctcgaggaatgcaccgacctgcaggccttcgggcgcaggatgctcgagctcctggcgaacgccgcgatgtcggcgaaggccgacgaggcgtgcaacgccccctacggggagcgcgacgaggggcgcgtcaactcgcgcaacggctaccgggagcgggggctctcgaccgccgcgggcgacgtcaccctcaagattccgaagctgcgccgaggctcgttcttccccgaggacctgatcgagcgctactgcagggtggaccgggcgctcgtcgcggcggtggccgagatgtacgtcatggggatatcgacgcgcaaggtggaggccgtcgcgggcgagctcggcgtgaggtcgatgtcgaagtcgcaggtgtcgcgcctgtgcgagtgcctggacgccgaggtggacgcgttcaggaggcagcgcttcgacggggtgcgcttcgcctacctgtggctcgacgccacctacgtgaagtgccgcgtggaggggcgctcggcgtcccaggccgtcgtgaccgcgatcgggctcgacgacacgggccacaagcgcttcgtcggcgtggactgcgtggacacggagagccacgccgggtggaaggcgttcctctccggcctgagggcgcgcggcgtcgacggcgtgcgcctcgtcgtctcggacgcccacgaagggctcgcgaaggcgatagccgagacgttccaaggagcggcctggcagcgctgcgtcacgcacctcatgcgcaacgtggcgggccgcatccacaggaaggacgaccagagaaaggcgcgcgaggccatgaaggccgtcttcgcgcagaagagccccgtcctcgtgcgggcgtgctaccaagaggcgaccgaggaggtgctgaagatctcgagggcggccggaaacgtgctcttggaggccgaggaggcggcgctcgcctacctggcgttcccggccacgcaccgcaccaagatccgcaccaacaacgtccaggagagggccaaccgcgagatcaagcgcaggacgcgcgtcgtgcaggggttcccctcgcgcgagtcgctcatccgcctggtgggagcggcgctcatcgaggccgacgaggagtggtcggcgcgctgcgtcatctccaggccctcgctcgcgcacgcctggaaggcccaggagcgcgaggcccccggcgaggccgaggtgctcgccgcccgcgaggcggcgcgcaagatcatagggagcgccattgacccgaaggaggacgaaggctaagattcacctcgcaagggtgccggcgattctccggcgatggccctgatacaccacgattcgggacgcggcctgcagcgtcgggcttttgctcggtcttctcgtattgcaagctattcgcagatcagatatatttagtattgctaggtgataaagagaagggttcggaatgcagctccggttcgcgcagcagatgaagaagggcgcgctcgacatgctcgtcttgaagctgctgcagcacgaggagaaatacggctatcagctgatcagcgagcttcgcgaccgctcgaacggcgcgctcgcgctcaaggagggcacgctgtaccccatcctctaccggcttgaggacggcggcctcgtgaccagccgcatgagcgcgcacgttgcgaaggagcccgcgcgcaagtactacgcgatcaccgaggcggggcgcgacgcgttgcgcgagatgtacgagatctggaacgaattcgacggacatgtgcggtcgatcatggaggaggagcaatgaacaaggaatcctatgtgaaggcggttgcgaagcgtctgacctgctcgaaagcgcgccaagccgagttcgtgcgcgacctcgaatccgacatcgccgctgctctgtcagcaggcgagacctgggagcaggtggaatcccgcatgggcgacccgcgtcaggtggcgcaagagttcaacgaggatctctccgaagcggagcgagccgccggctagaaacgcaagcgcaccaagacgatagctatcgtggcgaccgtcgcggtggccgtggcggcgatcatcggagccgcagcttggtgggccgcgccgaaattgtctcccgcaggacaaagctcgaatctcagcgagcagcaggtgatcgaacaggctcagaaagtggctgaggttgtgggggagggcgactacgacaagttgcgtccgatgctcgacgatgccgctgccgaggcgcttaccgagccggtcatgaaggatgcccatgcattgttcggcgacgattggggtgctctcaagtcgttcggaaacacgtatgcaacgggagtcacgcagatggggatgacgggcaacgccgtcaatctggttgcaatatacgagaatactacggtgacgttcgatataggttttaacgaagatttgaagatcatcggattgaatatgaggtaggagtcctatggggttcgccctcgcacgcgtcgtcagcgcagtcggcatggtttacgggtcgtttccgctcgcaggcgacggtcgtctctcagatcaagcagtacgccgacgtattgaaggagcatcatgggtgagccgatgaggttcgcggggaaagtggacggctggtattacgcgttgacggtgggcgtcaacgtcatgctggcgtggccgctcgcgtcgttcttcgccgatcctgcgaaagagggcgcgttcataagcgccgtcgtctgtttgctgtgccttgtcctctgcgacatcttcatcacccccacgcttcttcgcaactacgtcgagttcgacgggaagggcaacctgctcatcgtgttcggcttccagaaggcgacgtatcccgtctcgaagatccgccggttgcgcgagacgtccaacccgttggcttccctggcggcgtcgttcgaccgcatcgagctgcgcatcggctacgaggagctgatgatcgccgtcaaggacaaggaagaattcttcgccgagatcgagcggcggtgcccccaggtcgagatcgtgcgaagggcctccgtttccaagtccaggtgagctccgggcgacccggcgaccgccgcataaaaaaccggttgcgcgagtcgtagcgcaaccggtttcgattttcctggtgggcccagcagggctcgaacctgcaaccaagggattatgagtcccctgctccaccattgagctataggcccgtaaagcgtcccgctattctatcccaaaacgggcaccgatgccaaggggatatccgcaagccgatgcaaatcctcttcgagaaattttcgaaaaaggggcttgcgcgtattcgaaactaccggtagaatactcaaacgttgcgaacgacgcaaccgaaacggtcgcttggctcagcgggagagcatcgccttcacacggcgggggtcacaggttcaaatcctgtagcgaccaccatgaattctaaagccttcctttcggaaggctttttcatatcctcacgctttcagcgtgaacttccaagcgcaattgcaggagtcgtccgtcatatcggggaaacagctcaggcattcgcaggagatgcggtcgtcgatgctctcggcgaacaccccgtactccaccacgcccacgctgcggcagggatggaaccccatgcctttgcgcttgcgcgcgttctgcacgcggcagtcgacgatgcggtaggtcagctcgtcgccttccacgaggatctcgtcgacgttcgcggccgactggcagcgcagcgcgagcgcgcgggccagaccctcgatgccggggcgctcgtccagcccgaggaacttcttgatgcgtcgcgcctccgacacgctgaagcgccgccacgcctcgatgtcatggcgcacggccgtgtccatgccctcttctcgttcgagggactgaaaccaggtgccgtcgagggcgatgaggttcttcgcgtatatctccagaagctcgacgagctcgtctttcccaaggttgcgcaaggtgtcgttcatgtgggtgctccatcttctcgctttggctggcgcgtatatcgcgtacgtaggaattatactgcgcgcgagcggctccggttttcctcccgcgttcctcaaatgggcggatctatgggtcccgcccttcaggtcgagcgcagggcgggcgttcgggcgggctgccggagcttcggcgattgctgtaccgaacggcgaaaaccgttatactgaatcgttgcaaccatccaacgaagagcttcgatcaacggagaaccgacactatgagcatcgatagttttgaagcgagccgcaagcgctccgacgagatccgcgccgatcttcccatccaccccgagaagtacaccatgctcacgggcgaccgtcccacgggccgtttgcacatgggccactacttcggcaccatccgcgaacgcgtcgcgctgcaggacatgggcataaccacacgcatcatcatcgccgactaccaggtgatcaccgatcgcgataccaccgagcacatccaggacaatgtgtacaacatggtggtggactacctggcctgcggcatcgaccccgagaagaccattatcttcacgcattcggccgtaccggcgctgaaccagctcatgctgcccttcctgtcgctggtcaccgagtccgagcttttgcgcaaccccacggtgaagtccgagatggacgcgtcgggccatgcgctcacggggcttctgctcacgtatccggtgcaccaggcgtgcgacatcctgttctgcaagggcaacatcgtgccggtgggcaaggaccagctgccgcacatcgagcagacccgccaggttgcgcgccgtttcaacgagcgctacggccacgtgttccccgagcccgaaggcgtgctgaacgacgcggtggagatccccggcctcgacgggcgcaagatgtcgaagagctacggaaacgccatcagcctgtcgctgaccgcggaggaaaccgccaagctcatcaagaagtcgaagaccgacgccgaccgcatgatcacctacgacaaggagaaccgccccggcgtgtcggcgctcctcaccaccgccgcgctgtgcacgggccgcaccgaggtcgacatcgccgaggagatcggcgacggcgggtcgggcacgctcaagaagtacgtcaccgagagcgtgaacgagttcctggcgcccatccgcgagcgtcgcgtgcagctggccggtgacatggactacatcaaggacgtgctgcacgagggcaaccgccgtgccaacgagatcgcgaacgccacgctcgatgaggtaagagaagccatgaacatggtttattagactttttggtttatgacctggccttatcattggaaatcttgcaagtgcccaatttttgaaaattcggtattgcgaaatgatgaggttccggtataatcttcacttgcgcgatcaagggcgcacattcctcggtagctcaacggcagagcatccggctgttaaccggagggttgtaggttcgaatcctacccggggagccagaatttaacggcaggccagacgaacagtctggtctgtttttttattccgtcgcatccggcacctttcgcctcgcgcacttcgaaaagtgctgatcttgtgtgcgagcaagtatcgggctctgctcctcggattctccgttgcagggcttatactgaggtaggcgacaacacgtcgcttatgatcgcaacgctgacaacacggttgcatgcgtcgcagtatgagcccttcggggtggaaagctaggtttgtatgtctcaaggtacggttaagtggttcagctctgaaaaaggttacggcttcatctcccaggagaacggcgaagacctgttcgtccatttcagcgagattcagggcgacggctacaagagcctcgacgaaaacgccaaggtggaattcgtgatcgcgtccggttccaacggcaagagccaggccacgcaggtgtgcgtgctctaaagctttgaacgcatgaacgagcaaaagcggcccttaggggccgctttttttgcatgcaaggccgggctctgcggatcacgcttcgccgcgcagcttcttctcgcagtcacggatggtcttgtcgtagttgtcgatcttgaagttcaggcgatcgaggccagcctgcatctcggcgatgcgctgctccacgagcgcacgttgctcctcgagcagtgttttgcgcgcttcgagggtcgagtcgccctggtcgtacagcgccatgtactcgatgagcgcctcgatggacacgctggcggcccgcatgcacttcacgaactgcacgcgcgcgcaatcttgctcgctgtagtcgcggatgccgcttgccgtgcgggtgacgttcggcagcaggccgatgcgctcgtaatagcgcagcgtgtcgacggacaagccgtattccttgctcacttcggcgatcttcatgggaagctccttacctcgtaggtgcattgatgaaccacatagaacccactccaagtcaagcgatggcgggcgaatctgcccggattcccgtagcatggcccttcctttcgcatgcgatggcggatggcagcagcgtgcgatccaggcggctttccgccgtcgcgccgacatcggcgcgcgccggcttatggcagcgtggagcccggcggcctgaggacgtgccggttgccatctagcggcaaaggccgatttggaaacaatgcgcgttgcatgaacggtcggtttgcattttcctcttgacttggagccggctcgaaggaataggatcggttcgtcagacagtcgagacgagaggaaaggcacaatggcgaaacgcattctggtggtggcggcgagcccgcgcaaggacggcaactctgatcttctgtgcgagcggttcatcgaaggggcgctcgaggcgggcaacatcgtggaggaggtgttcctgcgcgagcaggtcatcggcttctgccgcgcgtgcgattactgccgcgaccgcgacggggcgtgcgcgctgcgcgacgacgccgcatccgtgctggacaagatggccgaggccgacgtcgtcgtgctggccacgcccgtgtacttctacacgatggacgcccagatgaaggtgctcatcgatcgcactgtggcgcgctatgcgacgcttgcgaacaaggagttctacttcattgcgacgatggccgacggcgacaaggcgctcatggagcgcacgttcgagggcctgcgcggattcaccgactgcctgccaggcgccgtcgagcgcggcgtcgtgtgcggggcgggcgcgtgggcgaagggcgacatcgaggggagtcccgccatggacgaggcgtacgagatgggcctgcgcgcgtaagcgcatgccgcgaacgaaaggaaacccaatggacatgaaggagagcctgggccctgcagcggtgttcccgctgggcgaggagaacgaggcgtacgcgcagtacttcgtcggcaaaagctatctggcgccgctgaccggggcggacgcgggcgtgggggtgagcaacgtgacgttcgagccgggatgccgcaaccattggcacgtgcaccatgcgggaggccagatactgctggtcacgggcgggcgcggctactaccaggaatggggtcggcctgcgcgagagctcgagccgggcgacgtggtgagcatcccgcccgagacgaagcattggcacggggcggcgccggacagctggttttcgcacgtggccatcgccgtgccggccgaaggcgcgtcgaacgagtggctggagcccgtctcggacgaggactacgccgcgctggcgtaggaggggatcgcggcttgctgctccggccgcgtcggcccggcccgtccgtttcgcgcaacggtgcggagggggaggaggctagccgatataggagctttctgcgattgaagaacccgtttcaccgcaagcggcttcttccggtatcatagacaagttgcgcctgcgggcgcagcaccgcaccgaactgcaagcagaaagcgcgcacgcaccatgatcatgcagcttgaacatatctcgaagtcgttcggagggcgccagctcttccgcgacgtgacgttccgcctggaagaatacgagcgcctggcgctcgtgggcccgaacggcgccggcaagaccactatgctcaacatcatctcgggcgccgaggatcccgacgagggccgggtgctgttcgcgaagggcgcgcgcgtgggctacctcgagcaggaggccatcgagatggccgaccagcccatcttcgaggaggtcatgtcctcgcaggtggaggtgctggaagccgagcgccgcctgcacaagctggaggccgagctgggcgaggcccccacgccgcagcagcttgctgccgccgggcgcgcccgcgacgcctacgaggtgctgggcggctacaccatcgaggcgaaggtgcgcagcgtcatgttcggcctgggcttcaaggaggacgacctcgcgcgctgcaccaccgagttctcgggcggctggcagatgcgtatcgcgctggcgaagctgctcatccgcaaccccgaggtgctgctgctcgacgagcccaccaaccacctcgacctggagagcgtgaagtggctcgagggctttttgcgcggctacgcgggcacggtcatcgtggtcagccacgaccgcgcgttcatggacaacatggtggaccgcgtggccgaggtggacaacggccaggtgaacctctacaagggcaactactcggcctacctcaaaacgcgcgaggagcgcctggagcgcctgcgcgccgaggcggcgaagcaggccgaggagatcgcccatatggaggcgttcatcgagaagttccgctacaaggccacgaaatccaagcaggtgcaggatcgcgtgaagaagctcgagaagatcaagcgcatcgagcttcccgaggagaagaaaaccgtcaagttcaacttcaagcagccgccgcgcacgggcgacgaggtggtgcgcgcccgcggtctcgtgaagcgctacggcgacaaggccgtgtacgacggcttcgacttcaccatgtaccgcggcgacaagatcgcgctcgtgggccccaacggcgcgggcaagtcgacgctgctcaagatgatcgcgggcgccatcgagcccgatgcgggcaccatcgagtacggcgtgcacgtgtcgaagacctactacgcgcagcaccagctggaggagctgcatcccggcaacaccgtgttcgaagagctcgaccgcgtggcgccgggttggagcgtctcgcaggtgcgcacgcttctgggcgcgtttttgttcacgggcgacgcggtggacaagaaggtgagcgtgctgtccggtggcgagaagagccgtctcgcgctggcgaagatgctggtggccccgcggccgctcctatgcctcgacgagccgacgaaccacctcgacatcgccagcgccgacatcctcgagcaggcgctcaaggtgttcgagggcacgattctcttcatcacgcacgaccgtcacctcatccgcggggtggcgaaccgcatcgtggagatcgagcccgggcgcgcgacgaactacgacggcgactacgactactacctgttcaagagcggacagctggacggcgacggccctagcggcccgtcgcttgtggacgagatgctggacgaaggccccaaggcgaaagcggcggggaaggccaaggacgccaagggtgcgaaagggaaggcggatgcgaagacttcggctgcggcgagcgggccccaagccgagctcacggcgccgcgcgcgagctcgcccaagaccaaggagcagaagcgccgcgaggccgaggcgcgcaaccgcgcctacgccgcgctcaagaaccatcgcaagcgaatcgccgagctggacaagcagatggagcgcgacaacgcgcgcatggccgagctgctggagctcatggccgaccccgccttctacatcaacgaggacgcctcgtcggacgccgtggccgagcacgccaagctcaagcagcgcctgaccgccgccgaggaggagtggttcctgctcaccgaggagctggaggaagagatggcgaggcaggcggagcagctgtgacgcggcttttgaacatcgtgctggtggagccggagatcccgcagaacaccggcaacatcgcgcgcacgtgcgcctgcacgggagcgcggctgcacctcgtagagcccatgggatttcgcctgacgcagaagaacctcgcgcgtgcgggctgcgactactgggatgaggtggacatcgtgcgctggccgtgcgccgaggcgttcttcgaggctcatgcagccgacgagctgcacctgttcaccgggcaggcctgtcgagggttcggcgacgtggcgtacggggagggatccttcctcgtgttcggccgcgagagccggggcctgcccctcggcctcatcgaggcgtacgcgaaccgctgcgtgcgcatccccatgcgcgagggcctgcgcagcctcaacctgtccaacgccgtggcggtggccgcctacgaggccctgcgccagcaagggtggccgggactggggtaggagctgcaggttgacccagccgtccaagcgggcattttcgcgctttagcaagataaagcgcgcggaggacgtggaacgcgtgtatacttgaccgcattgtctgcgtcacgtatcaaggaggtcgttcccatggctcgagtgtacaacttctccgccggtcccgccgttctgcccgaggaggtgctgcgcgaagccgctgacgagatgctcgactatcgcggttgcggcatgtccgtcatggagatgagccatcgctccaagcccttcgccgccatcatggaggccgccgagcaggacatccgcgacctcatgggcattcccgacaactaccgcgtgctgttcctgcagggcggcgcgtccacgcagttcgcgatgatccccatgaacctcatgaagaacaaggtggccgactacatcgtcagcggctcgtggtcgaagaaggcgttcaaggaagcgaagatcttcggcgatgcccgctgcgtcgcctcctccgaggacgagaacttcagctacgtgcccgacgtgcgcgccctccagctgtccgacgacgccgactacgtctacatctgccagaacgagaccatctacggcaccgtgtaccacgagctgcccgacacgaacggaaaaccgctggtggccgacgtgtcgtcgtgcttcctgtccgagcccatggacgtgtcgaagtacggcctcatctacggcggcgttcagaagaacgtgggcccggccggcgtgactatcgtcatcatccgcgacgacctcgtgtccgagcctttgcccggcacgcccaccatgctgcgctacgacacgcatgtcgacgcgaagagcctgtacaacaccccgcccgcgtacggcatctacatgtgcggcaaggtgttccagtggctgaaggcccagggcggcctcgaggccatgaaagagcgcaacgttgagaaggcgcagcttctgtacgacttcctcgaccagagcgcgctgttcaagggcaccgcgcgcaaagaggaccgctccatcatgaacgtgccgttcgtcaccggaagcgacgagctggacgcgaagttcgtcgccgaagcgaagaaggtcggcatcgagagcatcaagggccaccgcagcgtgggcggcatgcgcgccagcatctacaacgccatgccccgcgaaggcgtcgaggccctcgtgaagttcatgggcgagttcgagcgcgagaacgcgtaggcggcacgaaccgcctgcgatcgacgaagcgcccggtcgacggccgggcgcttctcattggggcgatggtggaccggggctcctagtacgcgctccagccgccgtcgatggtgagggtctcgccgttgatgaagccggcctggtcggaggccaggaacaccgcggcggcggagatctcctcgggggtgccggagcgggtggcgccggcgtagcccgtcgttgccttcgccatgccgcgctcgctgggctggcgcatcccgacgccgatgttggtctgcgtgttgccggggcagatggcgttgcagcggatgccggtgtcggcgtacatgaacgccacgttcttcgtcagacccacaacggcgaatttcgaggccgtgtaggcgcagcctcctcgtccggcgcacaggcccgacagcgacgcggtgttgatgatgacgccgccttcgccgcgctccatgaagtagcggacggctttgcgcgtgccgtacatgacgctgttcaggttcaccttcatgagacgctcccatacgtcgtcgtccatctcggcgatgggaagcaggttgtccatgatgccggcgttgttcacgatgatgtccatctgcccgaaagtctggacggcgcggtcgaccatgccctccgcgtcgtctcggttcgacacgtccaccttgacgacgtccagcttgtctccgtactcggccagctcctgcttgagcgcggcgagagcctcctcgttgaggtcggcggccagacagcttgcgcccgcctccaggaagcgttggacgatgctcttgccgatgccggaagcgcctccggtgatgacggcggtctgacctgcgagaacggggttgtggcgtgcttctgacatggcgatggctccttttcgcgatcgggaaatcatgcacgaagcgtaccatgcgcgccgggtcgcgctgaaccggttccgcggcgaaaggcctgttcggcgctgaacgcggggctcgcgcgacacgagcggcgcgaaaacgttttccagcggcgctggcgccgggcatctttgctccaaaaacacgcctcagcgactgaggcgtgtttttggagcgaagatgcgtttccgcatgccgagtccggcttcgcggcgttcgctccttgtgaagtttccctcccggcgcatgtcgccctctgcggttgcggtagactgatcgcactatgatttcgataccctacctcatatgctccattctgagcttcgtgcccgccatcgtgtgccacgaggcgtgccacggcttcgccgcctacaagctgggcgatcccacggccaagcgcgcgggacggctgtcgttcaacccgctcaagcacatcgaccccttcggcacggtcatcatgccgcttctgctcatggccatgaacatgccggtgttcggctacgcgaagccggtgccgtacaacccagcctacttcaaggacccgcgcaagggcgacctcatcgtgggcctcgccgggcctgcggccaacctcgtgctggccgtcctgggcgcagtcgtgtacacgctcgtcatgctcgtgctgccggtgagcgcgctggcgcagaacgacgtcttctactacttcctcacgttgttccttcccatgttttcgctcatcaacctgtacctcatgttcttcaacctgctgcccatcccgccgctggacggctcgtccatcttcgcgttcttcctgccgcagaagtatctgccgcagtattacaaagtgcagcgctacgcgatgccggtgttcctcatcgtggtgctcctcgtgccgtacgtgctgcatttcaatcctatcggcatctatctggacgcgacggccggcaacgtgttcgacctgctgttctcctttggcaggtagcagggcggctccatgtcgtacaaggttcgcatagacagcttcgaggggccgttcgaccttttgctgtacctggtcagccggcagaaggtggatatcggcgctatctccatcacgcagatcgccgatcagtaccttgccgaggtgtcgcgcatggacaacctcgatctcgacgtggcaagcgactttctgttggtggcttccacgctgctggagatcaaggccgaaagcctgctgccgcgcgagcgcgacgcggtggccgaagagttcgaggagctggcgcccagcgaggcgcgcgacatcctcgttgagcgtctgctggcctacaagcagtacaagaacgctgccagcgcgctgcacatgcgcttcgtgtccgagggacgcatgcatccgcgcccgttcgggcccgacgcgtgcttcctgaacctcatgcccgactacctgaaggacgtcacgatggacggcctggcgctgctggccgcccgcgccttcgcgcgccgcgacgtgttcctgctggaatcggagcacatcgccgcgaagcccattcccgtggaggtgcacgtgcgcgccatccaccagcgcatccagaacaagaagacgctgcgcttctcggaactggtggacgagcgcacgccggtgccggtggtggtggtgacgttcctggctgtgctcgagctgtacaagcgcgccatggtgaagatcgagcaggccgagctgttcggcgatatcgacatacgctacatcgaagggtcgggcgagctcgtgctcacgggcgatgactcgttgacctcggtggaggaggggtaggatccatgttccaaggcttgcaggacaaccagctgaagggcgcgatcgaagccatgctgttcgtcacggacgagccggtgggcaccatcgcgttggccgacatgctggaggtggagcctggccaggcggaacgcgcgctcgtggagctgcgggatcagctggaaggcgagaaccgcggcatccagttgcgcgaggtggccggcggctggcggctgtacacgcaccccgcctaccacgagctcattgagcgctacgtgctgtcgtgggacacgcgcaagctgtcgcaggcggccatggagacgctcgccatcgttgcgtacctgcagccggtgacgcgctcgggcgtggcctcggtgcgcggcgtgaactccgacagctccatcaactcgctcgttgagaaggggctcgtgcgcgaggcgggcgtagccgacgcgcccggcaaccccacgctttacgctaccacgcgcgcgttcttggagaagttcggcctgcgctccacggccgacctgcccgatctcgaccagttcgcgcccgacgatgacacgcgcgcgttcatccgcgagcgcttgagcgccacgcgcgaggacgcgtttgtcgccgatgacgcgcgcctggacggcgatgaggccgatcctctggacggcgtgcgcttcgagctggacgacgaaggaccggggagcatcgcggaaagtccgcgcgaggaagcggcctccgacgcggctcagcagatgctcgccgaggctatggccagcgggttcggcctcgtggagaagatcgacttcgacaacctgacgttcgagacggacgatgagtaggccttccgcgctcggcgccggcggcggcaatgcccagtcgctcggacagtcctcgcttcgctgcggaactcgcttggtgggcaccgccgccgccggcgccgagcgccgtgcgtcttgcgtcgtcgtctcgaacgacgggtttccgaagatcggaggcaggaggtgagcgacatgggggaatgtggggatcgtgtcgttcccatgcggttgcagaagttccttgctcgggcgggggcggctagccggcgggggtcggagaaccttatgacggcggggcgcgtgaccgtgaacggcaaggtggtgaccgagctgggaagcaaggtggatccgctcgtggacgaggtagcggtggacggcgcggtcgtgcgcctggccgacgggcccgtcaccatcatgctgcacaagccggccgggttcgtcaccaccatgtccgatccgcagggacggcgtaccgtggccgagctcgtgccgaccgaacgctatccggggctgttccccatcgggcggctggacttcgacaccacgggcctgctgctgttctccaccgacggcgagctgggcaacggcctgctgcatccgaagcatcatgtgacgaagcgctacctggcctgcgtcgagggtcgtccgaccgagcgcgatctggcgcttctgcggcgcggcatcgagctggacgacggcccgacgcagccggccgacgtgcgcatggtggagggcggggcggctcgccatgccgagcgtctgctggagattcccgccgccgtgccgccgcgctcctcgaaggagtatgcggccgtgtgcgaagggcgcgcgacgcggcgctctatcgtgcgcttgggcatccgcgaaggtcgcaagcgccaggtgaagcgcatgctggccgccgtcggccatccggtgctggcgcttcatcgcgattcgttcggcccgctcgagctgggcgatctgccgcgcggggcgtggcgcgcgctcgatgccgaagaagtggcggcgctccaccaggccatcggacgtgccgaataatgctagaatgaaacccgcaggagaccgcgcagcgggagcctgcggaacacggaatgaacccctatgctagaaaggcgctcccgtttcatggcacaccagcatacaacgcaacctgatcaggtgtttcgccgtatagcggtggtaggtttcggactggtgggcgcctcgttcgccgccgctgtgcgcgcggcgtatcccgacacgcgggtgctggctgtcgacatcgacgaacgcacgctggccgaagccgtcgagcgcggctgggccacggacggcgcgctgccggacgatcctgcgttcgaacgcttcgtcggcgacggctgcgacctcgtggtgctcgccacgcccgtcggcgcggcggagcgctacttcgaagacctcgcgcggtgggactatcgcggcatcgtcacggacaccgcctccacgaaggcgcgcatcacggctttggccgagcgcgtcctgccgcatcccgagaacttcgtgcccgggcatcccatggccggctccgaggtgaacggcatcgaaggcgcgcgacccgacctgttcaagggcgcgcactggatcctctgtcctgacgccgacacgcccgccgagcacttcccgcgcctgcacgagctggtcacctccatcggcgcgcgcgtcatcgcgctgccgcgcgaggaccacgacgaggcggtggccgtggtcagccacgtgccgcatattatggcgtcctcgctcgtgcagctggccagccgccacgccgacgaccagcaggcgctcatgcgcctggccgccggaggcttcaaggactccacgcgcatcgcggccggttcgcccgagctgtggtgcggcatcgccttcgacaacaaggacgcgctgtccgacggactcgacgagatccggggcatcatcggcgcgttcgccgacgcgctggcatccgacgaccgcgccgcgctcactgcgctgctggccgacgcggcggccgcgcgccgcgcgctgccggtcgcctgggtgccctcgacggagcgtctgctggaagtgcgcatccccatggaggaccgtccgggcgtcgtggccgaggtgaccaccgtcaccagctcggtggggtgcaacattcagtccatcgagatcgaccacgtcacggaggacagcgccgtgctcagcctcgtgctcaccgacgagggtgatatcggccagctgtccgcccagctcatcaacgcaggattctcagtatcgttcagtcccttgacggcaaaggagcatacccatgtcgcatgaagcaaacgccaccgtcgtcaacccgctgccggcgcccctgcgcggttcggcctcggtcccgggcgacaagtccatatcgcaccgcgccgtgctgttcgccgccatggccgagggcacctcgcggctttcgggcgtgctcgactccgaggacgtgcgctcgtccatcagggccgtaggccagctgggcgcgcaggtgtcgctcgagaagcagcctgacggcagcttggcgggaggcgtcacggggtggggcgccgccggcccctcgcagcccgaggcccccatcgactgcggcaactccggcaccacggtgcgtctgctcatgggcgtgctggcgccgtggaacgtgcgcgtggagctgacgggcgacgactcgctgcagcgccgtcccatgcgccgcatcaccgcgccgctcatgaagatgggcgcgcgcttcgagcccgaagggcgcgagacgctgccgctcacggtgtgcggctctgagggtctgcgcgcgataacctacgacgcccccatggcgtcggcccagctcaaaaccgcggtgctgctggccggcgtgtatgcgcggggcacgacgacgctcaacgagccctcgccctcgcgcaaccataccgagctcatgctgcccgaattcggcgtgaccaccacagcggccgaccgcacggccagcgtgacgggtcccgctgcgcttcgggcctgcgaggtgcaggtgccgggcgatccgtcttcggcggcgttcctcgtctgcgctgccgtgttgaagcccgacagctccatccaggtggagaacgtcagcttgaacaccgcgcgcatcgggttcacgcgcacgctcgagcgcatgggcgccgatatcagcgtgcgtcacacgggagcggcgggcaaggagccctacggcatcgtttcggcgtgctacacgccgaacctgcatgggtgcgaggtgccggccgacaagatcgccaccatcgtcgacgaagtgccggtgttggcgctcgtggcggctcacgcgcgcggcgtcaccgtgttccgcgaggtcagcgagttgcgcgtgaaagagaccgaccgcctggccgccatcgtggaggggcttgagactctcggcgtggacgcgtggatcgacggcaacgacctgttcgtggaaggccagccgggcttgcaagtgcccgtcggcgccgcattcgactcgaagaacgaccaccgtctggccatgacctgggcgctcgccggcctgtgcggcaacgctcccgtcgaagtggagaacttcgactccgtgaaaatcagctatccgcagttcctcaccgatatcgaaaggttggcacgatgatcattgccatcgacggccccagcggggccggcaagtccacggtcgcgaaggccgtcgcccgcgagctgggcttctcctgcctcgacacgggcgcgatgtaccgcgccgtcgcctggcgggcgttgcaggacggggttcccttcgacgacgacgaagcgctcggccgcctcgcgcgcgcccacgacatcgccttcgcgcacgaggagggcgagccggttccgcgccgcgtttccatcggcggcatcgacgtgaccgatgccatccgcacggccgagatcgaccgcgccgtgagccccgtgtcggccgcgccctccgtgcgcgcggcgctcgttgagcagcagcagcgcatcggccgcgcgggcgactacgtggtggagggccgcgacatcggcaccaccgtgttccccgaggctccggtgaaggtgttcctcaccgcatcggctgaggagcgcgcgcatcgccgcgtgcgccagaacgtcgaccgcggtgtgggctccgtcgactacgacgaggtgctcaccgacatccgccgtcgcgacgatcaggactcctcgcgcgccacctcgcctttgcgcccggccgacgatgccgtgcgcctggattccaccggccgctacatcgaagaggtcatcgaggacatttgctcccttgctctacgagcaagggaaagagccgacgctgcggcttccaccagcacccgatccgcggaaaccctcgctgaccttatgaacgaccaggaggattcctgtcgatgagcctgttccttccgtacgagaagatgtgggatatgccgctgggcggcacgtccgacgagaagcaggtgccgcactgggccggcaacctcatctggggcttcttggctttcgtgttcaagatctgcttccgctaccgggtcgaccaccgcgagagtttgcgcggtttcaaggacaagaccggggtggtggtcgtcggcaaccatacgtcgttcctcgacgtggcgtttatgtacctggccggacggccctcgcagtgggtgcgcttcctcgggcgcgagaacctgttcggcaacgcgcacggcctggtgggccaggtgctgtcgcgcgtgggcgcgtttcccatcaagcgcgacgcggccgaccgcaccgccatcaagcgcgccacgcgcatgctgaagagcaacgagatcgtggggatcatgcccgagggaacccgtcgcggcaaaagtgatcgcacgcctgagctgcactcgggagccgcgttcatcgcgaagatggggcacgcgcccatccttcccatgaccgtgcgcaacgccgagcacgtgaagcacaagggcgagcgcttccgtttcccgaagatcaccatcgagtacggcgaccccgtcctcgtcgaggacttcgacttcctgccgaaggaagaccgcttggacggctgctcgtggtacgccatgcgcgagtgcttcgcgctgtcgctgaacgtgccgcgcgagcaggtggacatgccggcgctgttccccggcggcaaggacttcacggccgtgttcgccgagcaccccgtcccgcatcatacgacggccgaggtcgtcgccggcatcgaggccaaggcggccgcgaaggcggcgaaggttcaggaggtcgcatgagagtggtgaaggcaagctacgccggggcgtgctacggcgtgcagcgcgcgctcgacatggccgtcgaggccagcgccagcggcgagggcgcatccacgttgggcccgctcatccacaatccgcaggtggtggccgaactggcggcgcgcggcatccgcgcggtcgacggccccgagaacgtcgagcgcggctcggtgatcatccgcagtcacggcgtgacccccgcggtgcgccgcgcggtggaagaacgcgagctgcccctcatcgacgccacgtgcccgcacgtcgcccgcgcacagaaggccgccgccgatctcgcacgccgctgcggctgcgtcgtggtggtgggggaggagggccatcccgaggtggaaggccttgtggcctacgcgcgcgaagcggggggcgaggtgttcgtggtcgccgccccgggcgacctgtctgcgagcatcgaggcgccggtgggcatcgtcgtgcagacgacgcaaacccgcgaggcgctggacgcggtggtcgaggcgctcgccgcgcgcggcatccggcccgaggtgaagaacaccatctgcttcgctacgcgccagcgccaggaatcggccgcggcgctcgctgacgaggtggacgccatcgtggtcatcggcggccgcaactcgtcgaacaccacgcgcctggccgacatctgcgccgccgcgtgcccgcgcacccaccacgtggaggcgcccgaggagctggatccctcctggttcgtcggctgcgagagcgtcggcgtcaccgccggagcctccactcccgaagaccagatagccgccatcgtggagcgtctggaggcgctgtgagcgcggatgccggagcgcgtccgatgccgccggtgtacccgtcgggcgatatcgatcgcgaggcggcggccaggcagcgcggcggctgcggcgcgctgcgcgaggcgccgcgggctctcgtgatcgccgtcgcgcccgacagcccggccgacgatgcggggttcgagcctggatgctacgtgaccacggtggacggcaggcccgtgcgcgacctcatcgactggcgctggcttgcggccgacgacgtcatggatctgggctacgtcgatctcgacggcgacgagggcgtcgtggaactggagcgcgaggagggcgaggactggggcttcgagttcgaaggcgtcgtgttcgacggcgtgaggcaatgccgcaacgcctgcacgttctgcttcatgcgccagctgcccgacgatatgcgctcctcgctcaccttacgcgacgacgattttcgcctgagctttctcgcgggcaccttcgtcacgttcaccaacctgaagcccgaagacgaacggcgcatcgtcgagcagcgcatatcgcctctgcgcctgtcgctgcacgtggcggatccggaggtgcgccgccgcatgatcggcaagcacgcgcagcacggcatcgacgtgctggagcggctgctggaagcgggcatcgagttccacgcccagatcgtgctcgtgcccgaccagaacgacggcgccgtgctggaagacacgcttgcctgggcgtacgcgcgccccggcattctcgacgtgtgcatcgtgccgctgggattcacgaagcaccagagcgtcttcgaccgcagcttcaacgaccccgtgtcgtcgcgcgcggtgatggacctcgtcattccgttccagcggcgcgctctggccgagcgcggcagcatgtgggccttcccggccgacgagttctaccataacgcctacggccccgagctgttgcggaacctgccgccgtcggagcactacgatgacttcggcatgttcgaggacggcgtgggcatcatccgctcgttcgttgacgactggaaaagggcagagcgcgcggggctcgtcgagcgttgcgccgcggctctgcgcgccgccgacgcgcgcgtccactacgtggccggctgcgcgacgcgccacttcctgggcccgctcatcgatgcgagcccgctcaaggggctgctgatcccgctgttcgtgaagaacgagttcttcggcggcaacgtggacgtgacggggcttctatgcggctgcgacatggccgatgccgtgcgtgccgagcgcgagcgcggcttgcagctggcgctcatcccgcgcgtcgtgttcaacgacgacgcggtaacgctcgatgacatgagtttggaggatatggaaaagcgggcgggcgcgcgcatgtccgtggtatcctgtaacgcatcggattatctcctcgagatcatccacctggtcggacgaaccgatccgacctcctgaccgcaccaatcgaagcaatctgcgaggtagcaatatgcctttacccatcgtcgcggtggtcggacggccgaacgtcggcaagtccaccttcgtcaaccgcatagcccaggccgacgaggccatcgtccacgagatgcgcggcgtcacgcgcgaccgctcctaccatgaggccgactggaacggcgtcgacttcaagctcatcgacaccggcggcatcgagatgggcgacgacgacgccttccagggctccatccgcaatcaagcgctggccggcgcgaacgaggcggacgtcatcctgttcctcgtggacggcaagaccggggtcaacgccgacgacgaggccgttgcgcgcatcctgcgcaagacgtccaagcccgtgttcctcgtggtgaacaagctggacaccccgaaccgtatggacgaggtgtgggagttctaccagctaggcctgggcgatccgtggccggtctcggccatgcacggccacgggacgggcgacctcttggacgaggtcgtgaacgagctgaagaaggtggacctgcccgccgacgccgacgaggaagacggcatcaacgtggccatcatcggccgcccgaacgccggcaagtcgtcgctcacgaacaagctcaccgccaacgaccgctccatcgtctccgacgtggcgggcaccacgcgcgacgccatcgacacccatatcgtccacgacggccagcgctacaccatcgtggataccgcgggcctgcgccgcaagagccagatcgacgaggacgtggagtactacggcttcgtgcgcgccatgcgagccatcgaccgcgccaacgttgcgctgctggtcatagactccacgctgggcctcaccgatcaggatcaacgcgtcgccggtttcgcggccgagcgcggctgcgccatggtcatcgtgctgaacaaatgggatctcatcgaggggcctgaggcgaaggccgagatccgcgagcgcatcgccgaccgtctcacgttcgtaggctatgctccggtcatcgccatctcggcgctcacgggcaagaaggtcgatcgcatctgggacgccgtgaacgcggcctatgagaactacagtcagaccatccccacgaaccgcctgaacacgtggcttgcaggcatccgagagttcggacacacggtgagcaagggcaaggcggtgctgcgcatgaagtacgtcacgcagacggctacgtgtccgccgcagttcacgttcttcgcgaaccgcccggacctcgtggacgacaacttcgagcgctacctcgagaaccgcttgcgcgagaacttcgagctcgtgggcacgcccatcaggatcaagttcaagaagaaggattaggggtcatgggggatttgctggttgcggccggcctgttcgtcgccgcgttcctgttgggatccattcccttcgggctgatcatctcgaaggtgttctaccataccgacctgcgcgagcacggcagcggcaacatcggcaccaccaacgctatccgcacgatgggcaaggtgggcggctacgccgtgttcgtgctggacttcggcaagggcctgctgtcgggcgtattggcttgggcgttcagcatgcagttcctgccgggcggcggccttgagcccggcgcgctcgtcacgtacgacaccatgctggccgtggcgttcctcggctgcgtgtggggccatatcttctgtccgtggcttggcttcaagggcggcaaggggatcgcggtggccgtgggctgcctgttcgtgacgttcggctggatcggcgcctgcctcgagctgctcatcttcatcgtgctcgtcgtggcgacgaagcgcgtgtccgtcggctccatcgcggcggctgcggcctgcccgttcttcgcgctgtacttcttctggggcgattggctggcctggctgttctgtaccgtcgccggcctgaccgtggtctgggcgcaccgcgagaacatcaagcgtctgcgagccggcaccgaaagcaggatcggcgacaagggcaagaagaaggaagcgtagggagctcacatgaagatcgcggttatcggggcggggtcgtgggggacggcactcgcgcagctgctggcatgcaacggcaacgaggtggggctatgggcccgcaagcccgaggtggtggaggccgtcaacgcctcgcatgcgaacccgcgctacctgagcgaggtggagctttccccgcgcatcgtggccacgacctcctacgaggaggccttggcgggcgcgcaggccgccgtcatcgtgacgccgtcgagcgtcatgcgcgacgtggccggcgtgctggccgaggcggtggacgacgatttcccggtgatcatctgctcgaagggcgtcgaggagggaagcggcctgctgcccgtggaggtgttcgaggccgagatgggcaacgcgagccgcctggccgtgctgtcggggccgaatttcgccgcggaggttatccggggcatcccgtcgggcaccgtcatcgccagctccaacgaggagactgcggcgttcttccagcagctgttcgcgtccgagacgttccgcacctacgtcagcgacgacgtgtgcggcgtggagctgtgcgcggcgttcaagaacgtaatagccatcgccgtgggcgtgtcctacggcctggggtacggcgacaacacggctgccatgctcatgacgcgcggcttggccgagatgagccgcctcgtcgtgcgctgcggcgggcaggccatcacctgcatggggctggccggcacgggcgacctcgtggccacgtgcacctccgagcattcgcgcaaccgtcgtttcggcaagcttctggccgaaggcggcacgctcgaggagttcgccgcgcagacgcacatggtcgccgaaggggcgctcgcgtgcaagacgctcaagaccctggcggactgctacgacgtggagcttcccatcaccgacgtcgtgcgcagcatcgcctgggagggcgccgaccctcacgatgtggccaagaccctcaccagccgtccgctcaccaccgagttctacgggctctagcgcgtcaatccacaccgaggcaacaaggcgttgaccgggggttcaccgaacgcgcgagcgtattgtcgcacggccacagcgcgggtactctagtccttgccaaccgaaagggcggctttgacaatctatccgagtgcccgtcgtctcgtctctcgtgtgaaccccccctctctctcactctctcaaaccttcgacgggccgtgagcatgcgcaccttcccccttctcctctgtgcgcactgcatagcctccctcgggtccccccaacccaagggaggcttttttacgcccgctcttcggcttccaagtacttcgatgcgtccacgccgagcttcgccagcttcacggcgccgacccatggggcgcccgcggaggcgacgaggcccggcttgtaggcgagcatcgtcacggtagcatcggcggcgaacgtcggccgcgccgcggctccggtttgcgccgagaggccgctggggacgtctgccgccacggcgaacggggcgtccttggctttcgcaggcagcgagcgccgcggccgttcgtgctcgcctcgctcgtgcgtgcgcttgcgatgccgcccgcggcccttgccgcgcttcccctcgaagcgccggcggttggcggcccgtatccatccggcgtacggctcgcgtacctcgccgccggagaaaccggtgcccagcagcgcgtccaccacggcctcggcttcgtcgacggcatcggccagcacgtcggcgtcgggcgcgatgagcacggacagcggaaggccgtcctcggcggctcgggcgaacgtttccagcgccgcggaacgcgccggttcggcatgcaggcgctcggccaggtcgggggcgaccagcgtcacggggtagccggcctccgccagcacgcgggccgccacccacccgtcgccgccgttgttgcccgatcctgaaagcaccacgaccggcgccgggtcgggcacccaggcgcgcacctcgtcggccacggcccgccccgcccggtccatgagctcggcaaggggcgtgccgtcctcggccacggcacgctcgagcgcggccatctcgtcgacgtcgagcacgccgcggcgctcgcgcgccagctccacgccggcctccgtcatgacgcgcgttcccgacagcacgccgttcagcatgacgaacgaccgcttcctcgcgccggctcgcacggcgcgcacggccagcgacacggcccaggccgtcatgaaggccgtccacgcccccacgacggccgcccggtgttcggcggcgaacgccgcgagggcgttcatctcgccgacctgtgccgcgtcgaggtccagcacgccgaacagcagcgcgaacggcgcccagccgaacaacgccaacagcccgtaacgtgcgaggtactggtaccagcgcgccgggatcgcgtccgtcctcacgatgcgcagcctcagcagcttctgcgccagcgtctgcccgcgggtgagtgcgggaaccagcgcgaagaacgctgcgaacgataccgcgtccgcggcctgcaccgccgtgccccagctcgcgccggcggcctcgacggctgcgcgagcgcccagcgcttcggctgcggccgtcgccgccccggccgcagccagggtgatcgccagatcgatgaagaacgacagcgcgcgcttcgtcacgctggcgcgcatgcccgcctcgcgcgcctcctcgttcacgagccggatgtcgggcagcacgcgcatcgcgggcccaaccgtccagaatccgatcatcgctcccagcgtgttcagcatgaggtcgtcgacgtcgaacaggcggtacggatgctcgtagaggccccagagcccggtgagctgggtcgtctcgaacgacagcgtcaccagaaaaccgatggcgagcgtctgccaccacgtgcggcggaaatagtagcgcaggtacatgcccagcggcaccagcagcagcacgttgaagaacgcctcgtagacgtacgggtcgcgcagcgcggccagccaggtggacggatcgctcagcgagaacgtcgtttcggccaggaacccgcgcacgaagttgagcggcacgagctgcggcgtctgcgcgtagggcacgacggccgagcggtcttcgggcaacggcagcagcacgaggaagtacgcgcataagaggtagaacgcgaacgagtacaccacaagcgtgcgcagccagggtatagagccgaacctgcggtactggtagatcatgtagggaagggtgatgaagaaggcgatcagcggaaacgagagcgcggcgaacaggatgttggagacgtagacgttcatgcggcaagcgcctttcgggtataggtcgggaagcgggaagcgggggagaggtcagctgccttcgcccgcgctcgcgcgctccaaggccaacagcgcgccgcgcagccgtgcgttcgcgccgaggggcgcgccgcccgctcccacgatgcggtgatcgggcacgagcaccgccagcgggttcttgtgcacggcgttgcccaccgcgcggtacgacgacggcttgtccagaagggcggcgacgtcggcggtggtgagcgtctccccgtaagggatgcgttccagctcgcgccacacggccagctggaacggggtgcctgcgggtgccaagggcacgtcgaacgcgcgtctttttccggcgaagtactccagcagctcagtggccgtgcggttcgccagctcgctcgggcgtcgctcgcccggaagcggtgcgtcgccgaagacgacccgggtgacgccgcgatcgctcgtggcgatggtgacgaggccgtgcggcgtccgatatgcgtaatgcgtgccaacgcgtgcagccatggagccttcttccagaggggaatcccattataatgcagcacgccgcatcgcggggaggcggtcggccctcgccgtcatcatgttgttttcctccagcgctcgggacagcgtcgcggcgggagcaggccttgcgctagaatgggcgcaacgacgatgaggaaggacacgagcatgttcgaaccggtgaaaatagcgccatccattctgtcggccgatttcatgcatctcggtcgcgacatcgagctgatcgagaaagcgggcgcaggatacgtccacgtcgacgtcatggacggccatttcgtgccgaacctcacgatgggcgtgcccgtcgtcaagcagctgaagaaggccacgagcctgccgctcgacgtgcatctcatgatagcgaacccgctggagcagctgccttggttcctcgatgcaggagcggactcggtgaccgtgcatgccgaggcgctcgacgccgacgggctggcgcgcgccgtcgcggccattcatgcggcgggggcgaaggcggccgtcagcgtcaagccccgcacggcggtcggcgcgctggcgccggtgcttgccgatctggacatggtgctggtcatgagcgtagagccgggattctccgggcagagctacatcgagggcagcgaggctaaggtgacgcgcatcaccgagatggcgcgtgcggtgggcgcctctccgctcatccaggtggacggcggcatcggggaggtcacggctcctatcgtggccgcagccggagccgacgtgctcgtgtgcggaaacgccgttttcgcggccgaggatcctgccgccgcgctcgcggcggtgcaggcggcggccgaggaggcgcgcctggcggcgctggccgtgtcgaaggaggcgtaagcgcaatggcgtccgtgccgaacgactacgtgtacctcgactacgccgcgacggcgcccttatgcgaggaggccgccgaggccatggccccttatcaggtgcccggccgcgcgaacctcgcggtcggcggcaacgcgaattcgctccacgggcccggccgtgccgcgttcgccgcgctcgaggaagcgcgccgatccatcgcgcgcgacctcggcgcgcgtcgtcccgacgagatcgtgttcaccagcggcgccaccgaggccgacgacgcggccctgctgggcatcgcgcaggccgccgcggacgagcgccgtcggcgcggagcaggggatttcgtcccgcacgtcgtggtcaccgcggtcgagcacgacgctgtgctggcgcccgcgaagcgtctggaatcgcagggtttccgcgtcacgcggctcgccccgaaccgtcagggcttcatcgaggagcgcgcgttggaggcggcgctcgacgccgatacggtgctcgtgtcggtgcaggccgccaacagcgaagtcggcagcatccagcccatcgccgatctcgcccgtgtcgcgcacgatcatgccgcgctgttccacaccgatgccgtgcaggcgctggggaaagctcgcgtgaacctgcaggagctcgacgtggacgccgcgtccttctcggctcataaggtgggcggccccaaaggcgccggcgcgctgtatctgcgcgcccgcacgccgtttcatgcctacgctattggcggcggccaggaaggaggccggcgcagcggcacgcagaacgtggccggcatcgtcgggttcgcggcagccgtgcatgcggcgaccgcgatgcaggaggcggaggcggctcgcctgcgggttctgcgcgacaggctgtacgagcggctgggcgccatcgacgcggtggaggccaccgtggacgttgcgccgggcagcgaggatttccttccgaacatcgtgcatgtgctggtggacggtttggaaagcgaaacgctcatccttcgcttcgacatgcagggcttcggcgtgtcgggcgggtctgcctgctcgtcgcactcgctggaacccagccacgtgctgcgttccctcggcatcgacgccgaccgcgcgcacggcgccctgcgcatctcgatggggcgctacaccgacgaagccgatgtcgaagccttcgcggtcgccatggagaagagcctgaactggaactgaggatcgaggacgcgcgagcttggtcgcgtcgatgagcgtcgaggagcgctgagcctatggaattgatcaccacgcacacccacacctgcttcaccaaccacggtgagggcacggtggaagagctcgtgtccgccgccgtcgcggcgggcgtctccaccatcgcggtcaccgagcactatccgatgaccgcgacgttcgaccccgaccgctacctgtcgatgccggccgagcggatgggggagtacctggccgccgtcgaggccgcgcgcgaggcgcatcccgagatcgaggtgctggtcggctgcgagatggactggctgggagacgacgaggaccgcgtcatcacggcggaggacgtcgcgccgttccagctgatcttgggctcggtgcatctcgtcgaccgctggcctttcgacgaccccgcccagcgcggccgctgggacgaggtgggcgccgatcttatctggcggcgctacttcgaagtgtggtgcgaggccgtgtcctccgacgcgcccttccacgtgatgtcgcatcccgatctggcgaagaagttcgggttctaccccagcttcgacccgcagccgttgtacgagcaggctgccgaggcgtgcgccgcggccggacgcatggtggaggtgaacacgtcgggatcctactacgcctgcaaggagatgttccccgcgccggcgctgctggccgcgttctgccgcgccggcgtgccctgcacggtgggcaccgacgcgcacgtgcccgccaacgtcgcgcgcgacatcgagaaagcctatcgccttatgtacgaggcgggttatagaacggtaacggtcccgacagccgacggcgaccgtcgggccatcgctatcgagtaacgtgggatcgaaagtctagttcgaacacgagcgaaggagccgcgccatggttgcagcgaagaagaaccagaaggattccaagggtcgggaaggtttggcgcgccgtgcgtcggggttgctttccaagcctgtcacggcggtcaccaccggcgcgctcgagcgcgcgctgctggccgagtttccggctgccgacgccgagccgtgggatcgcaccggcatgtcggtgggcgatccggcgcgcctgatcacgggtgtggccgtcgcgctcgacccgacggtcgaagctatcgaggcggctgcgaacatgggtgcgaacgtgctggtcactcatcatccggcgttcctcgcgccgcccgcctccttcatgccggcctcctcggtggcggccaatccgggcgcgggcgtgtggcgcgcggtcgagcgcggcgtatccatcctgtcgtaccatacggcgctcgacgtgagcgtgcgggcgcaacgcgtgctgcccggcatgctgagcctgacgtttcagcaggtgctcgatcccattcccgggtcgcgcgagaagggctacggtcagctgtgcaccctcggcgaggacgacgggctcacgctgggacagctggccgcgcgctgcacctcggtgttcggccgggcgccgcgcgtatggggcgacttccctcgcgagctcgaccgcgtggtcacctgcacggggtcggccggcgatctgggccgcgcgtgtctgcgggcgcaggtggactgcctcgtgtgcggcgagatcaagtaccatgatgcgctcgagctctcccaggcgggcttggccgtcgtcgatctcggtcatgacaccagcgagctgccgctcgcagccgtgctggctgctgcggtggaaaacgcaggaattcccggtgatctggtgacggtgctcgatcagggagataactggtcgtaccctgaaacggtacgggtataatgctaaggagcgtcgcagcggcggcgctccgttcgaacaaaggatgcgcatgcacgtagacaccgacgatcttgccacgctgctgaagatgcagcatctcgacctggaagccatgcgcgacaagaagaagctcgaagagcttccccagcgcgccgtcatcctggaagcgcgctcgaagaagaaggcgatcgagcagaagcgagcccagctcgacgcgctccatgcgaaagccgacgcgcagctttcgcgtatcgacgacgaggatcgctcgctttccgagaagcagcgtcaggtgcagagcgagatcgacgcggtgcgcggcgactaccgcggcgtggaggcgcgcacgaaggagctcaacggcttcgcgaagcgccgcaacacgctggaagccgacctgaccgccgtcggcgacgagctggcgaagatcgaaggcgtgcaggcgcaggtggcatcggcgttagagagcttggagcgccaggaggccgaggccacggcggcgttcgtgaaggaaggcggcgcgctcaaagacgcgctcgcgcgcatcgaggccgaacgagcgatgctggcgtcctcgttgcccgccgacctgcttgacgcctataagaaaacggccgcgcgcacgggcggcgtggccgtgggacgcttgcaaggctcgaattgcggcgtgtgccgcatggccatcgagggcggccgcctcatcgacatgaagggccagggcaacgtggctccgtgccctcagtgcggaaggctgctcatcctggagtaggggatacggcgcgggccctgctcgcgcccatcgagagaacgacaaaaagcccgcgcgagcgggcttttcaatgtcggcttgttggccggcctcatcggccggcggacgtgctatgcgcgctcgaccttgccggccttcatgcacttcgtgcagacgttggccttgcggacgtgaccctctttgtccttgatggtcacgcgctgaatgttcggacggaaccagcggttcgtcacgcggtgcgagtggctgacgttgcgtcctgcgctcggcgccttaccgcaaacttcacaaatcttcgacatcgttcatcactccatgtacgttgggtactcatcggcaaaaaccgttgatgacaaaaaagccctcacactatagcacataaacgaaaagggttacaagaatttttcgtgtagtatactttcgcctgctaccaggcgcgccgcacagcggcaagcccttgcgctatactgcgttagcaggttttttgtcgtgcgcggcacccccgcgccgtgaaaggaatgccatgaacgatacgatagcgggcaacctccacgttgccaatgacgtactggccgacatggtcggcaatgcagcgctcgagtgctacggcgtcgtgggcatggccgccccgaacgccgccgacggcatcgcgaagatcctccccgcgtcccgcctgcgccgcggcgtggtggtcaccactacggaggtcggcgtgcacgtggagctgtacgtcgtcatcgagtacggcacgaacatcaacacggtgtcgcagaacctcgtcgaccaagtgacgttcgcgttgagcgagtacgctcgcgttccgctcgacggcgtcgaggtgcacgtgcagggcgtgaaggtgcgcaagtagcgcgtcctccctgccatgatgagccgctgcccgcccggagagaggggcgaaggcgctctgcggcataacgtttaaggagaatagatcagcatgccagaaccctataccgcgaacgacctgctcaacgccatcgccgtcgcgagcaagaccctgagcgagcgcaaggacgagatcaaccgtctgaacgtgttcccggtgcccgacggcgacacgggcacgaacatgtcgctgacgctggagacggtcgtcgagaacctggccaacctgcccatcggggcggccggcgcggaaattcgcaaggcgatcacgaccggcgcgctcatgggcgcacgcggaaactccggtgtcattacctcgcaaattttgcgcggcctgtgcgagggcagcgtaggccatgacgagctgaacgccgacagcatcgacgcggcgttcgcgaaatcgcaggaagtggcgttccaggccgtccgcaagccggtcgagggcaccatcctcaccgtgctgcgcgacagcgccgccgccgcgaagcacgcccgtaagaagaagatgggctgcgacgaggcgctggcctacgtggtggaggaggcctacgcctccgtgcagcgcacgcccgacctgctgcccgtgctcaaggagaacggcgtggtggacgcgggcggcttcggcctggccatcttcttcgacgcgttcgtctcagcgctgctgggcaaggaaggccccatggtggacgagctggcgttcgcgcgcggcacggcgccgaaggtggagatcgagcagatcaacgactgggaggggtcggcgtaccgctactgcaccgagttcctcgtgcattccgacacggtggacgtggacgcggccaaggacttcctgcccacgatgggcgactgcgacctcatggtgggcatgcaccccaacttcaaggtgcacgtgcactcgaaccgccccgaccaggtgctgggctggttcctcacgcacgatgcgcagatctccgaggtgcacatccacaacatgcagcagcagagcgccgcgcgcaccgacgcgctggccgccgagcagggggaggcgcccaagccgctcggattcgtggccgtggccgcgggcgagggcaacgcgaagatcctcaagagcctgggcgtggacgtggtggtgtccggcgggcagaccatgaacccgtccacgaaggacctgcttgatgcggcgggtcaggtgaacgccgacgccgtcatcatcctgcccaacaacaagaacatcatcatggccgcccagagcgcctgcgagctggccgagacgccgtgcgccgtggttcccacgagaagcgtgcccgaggcgttcgccgccctgttcggtttcgacgagggcgccagcctcgaagagaacgtcgagtcgatgaccgaggcctacgccgacgtgaagaccggcgaggtgaccgtggcaatcaaggattccaaggacgcgcacgacaaccccatcaaggagggcgacgtcatcggcatcgccgacggggccatcgaggccgtgggctccacgaccgaggacgtggtcatggcgctgctcggcacgatggaggccgaagacgccgacacgctcaccatcctggcgggcgaggatatgggggatgacgccttcgacgcgctgatcgcgcgcatcgaggatgcctacgacgacctcgagatcgacgcccaccgcggcgaccagcccttgtacccggtggtcatgtccgttgaataacgaccggcccgacagacttgcagcaacgctcgcgctcgacgaatcggtcgggcgcgttcgtttggtgagcccggcgcgcgctcgcgcgctcgacgggctcggcatccgcacggtgcgcgacctggccacgcacttcccgcggcgctacatcgacctctcgcgcaaggcaaccgtggccgctggggtcatcggcgagcagtgcaccgtcgaaggcgcggtgcacgagatcaagctcaagaagcccaagccgcgcctcacgctcgttgagctgtcgctcgtggacggcacgggcgtgctcatggtgacgtgctttcgtcagccatggctcatggaccaggtgaagcccggcatgcgcatcgcggtggcgggcaagctggaattcaactacggcttcaagcgcatgacgaacccgtatctggaagtcctcgacggcgaaggggcggccgagggcatgatcatccccgtgcatcccgcttgcgagaagatatccgctgcgtggatgcgacggctcgtgggaaacgcgttggaggccgtatgcgggctgcatgatccgctgccgctcgagctgcgtgcgaagtaccgcctgatgagccgcggcgcggcgctgtcgtgcatccacttcccgcatgcgatggacgaagtggccgaggcgcgccgccgcctcgtgtacgaggagctgctgctgctcgagctgatgctcatgcgcgagtcgcgcgagcgcacggacgggtgcgaaccggtcgtccacgcggtggacgggccgcgcatggcggcgctcgccgaggcggtgcccttccggcttaccgacgagcaggaggaggccaagcgcgacatcctcgccgccctcgctgcgccgcaaacggcgaaccacctgctgctgggcgacgtgggcaccggcaagaccgtcgtcgccgccttcgcgctcgcggcggccgcggacacgggtgcgcaggctctgctcatggctcccaccgaggtgctcgcgcgccagcacggcaagagtctggggccgctgttcgatgccgccggcatctcctgggcggtgctgaccggctccacgccctcggccgaacgcgaggccgtcctcgcgcgcgtggcggagggctcggtggacgtgctcatcggcacgcacgcgctgctcgaggacgatgtggcgcccaggcggctcagcctcgtggtcatcgacgagcagcagcgcttcggcgtggagcagcgcgccaagctgctggcgaagggcgatgcgcccgacgcgctgtacctcacggccacgcccatcccgcgctcgctggcgctggcgctgttcggcaacctgaccttgtcctacctcaagcaccgaccgcacgacgcggcgcagcgcgccacgttcgtgcatcagaaggccgaccgcggccatgcctacgacgccgcccgcgcggcgctcgcgcgcggcgagcaggtgtacgtggtgtgccccctcatcggccaggatagcggcgagcgcgacgcgaaggcggcggacggcggaagcggcggacggcggcgcgaggcggacgaggaggcctacgagtacgccgccatcagcatcgagaccgatgacgacctggagggcgacgacgtggcggccgccgcgaaagaggcgtcctacttgcagggaaccgtgttcgccgattatcgggtcgagcttttgcacgggcgcatgcccgcttccgagaagcaggccgtcatgcagcgcttccgcgacaacgagacgcaagtgctcgtggccacgacggttatcgaggtgggtgtggacgtgcccaacgccacggtcatgatcgttgaagacgccgaccgcttcggattgtcgcagctgcaccagctgcgcggccgcgtcggccgcggcgagaaagccgccgaggtgcatctcgtgtcggcctcgaagtccgacgccgcccttacgcgcctgtccgcgatggtcgacaccgacgacggcttcgagctggccagctacgacttgtcgctgcgccgcgagggcgatatcctgggcaaccggcagcacggcgcgtcgggcctcaagctggtgaacgtcatgcgcgacggcgcggtgatcgaggccgcgcacgccgacgcggcggccatcctggaagaggatccgaacctggaactgcccgcgcaccgcgcgcttgcgcgcgaggtgcgcatcgtgtacgccaacgaccacgtggcgcaaggaggctgatacgcaatgaggatcatcgcaggcgagtttcgcgggcgcacgctcaaggcgccgaagggggagggcacccgccccaccaccgaccgcgtgcgcgaggccatgatgagcacggtgcacagcgcgcgcggcggattcgacgacgcggtggtgctcgacgcgttcgcagggtcgggcgcgctcggcctggaggcgctcagccgcggggcgcgcagcgtccagttctgcgagcgcgggggcgaggcgctgcgggcgctcaacgcgaacgtgaggctgctcgggctcgacgcgcgccgcgcgcgcgtgcgcaagggcgacgtgctgaaggacgtgccctacgcgcgtccaccgttcgacctcgtgttcctcgacccgccgtacgcatgcgccgccgccgaggtgctcgggctcgtcgtcgcgttgcgcacgcgcgcggcgctgtccgacgatgccatcgtggtgtacgagcatgcctcggcggcgaacgacgaggtggaggaagcggcaaaagcgcgcgatttgtctattgcgcagcgcaagaagtacggggatactgtcgtggacgtgctgcgcgctacagcgctgcacgatgcgatcgactgaaaccaagaaggaacggaaagccttacatgaaacgtgcactgacgcccggaacgttcgatcctatcacgagcggacacctcgatgtcatcacccgagcagcgcagctggtggacgaggtcgtcgtcgccgtggcggcctcgccgaagaagaagcccctgttctccctcgaagaacgtgccgagctggtacgtcgggcgacgagccatctgcccaacgtccgcgtcgaaccgttcgacgagctgctcgtcgaccttgcggcgaagctcgacgccaccgtggtcatcaagggcctgcgcgcaatcaccgacttcgagtacgagtttcaaatgaccgcgctcaactaccagctgaaccaggagctggagacgttgttcatcatgtcgccgccgcagtacatgtatctgtcgtcgtctatcgtgcgcgagatcgcgagcctgcacggcgacgtggcgcagttcgttcccgcatgcgtgaacgaggcgttgctgaagaagttcggcgacgcgtagaaactgcccgttagcaggtcacggtttcgcgtcggcgcggttccgaccgggtaaaatgtgcgcgctttgtgcattggaggttggctttcccaacagacatgctagaatattgcgacgcatgcacgcgaggatacccgtgcgcgccaacgcagatgaaacgcagcacgcctgggtggaaggacaatcatggacgaaacaggagtcttggggctgttggaagagctctcgattctgcttgaggactctaagccggttttcggcaagggcaacatgcgccaggtcgacatcgccgcggcgttcgagatcatggatgagatccgcgacacgttccccagcgagttcgctcaggcccgtcagatcgttcgcgagcgccagagcttgctcgacgatgccgaggccgaggccaaccgcatgatcgaggatgcacgcagccaggccatgaccatcgccagcgagcaggagatcgtccgcatctcccagcagcaggccgaccaggtgctctccgacgcccgcgagctggagcgccagacccgtgccggcgccgaggactacgccgacgaggtgttcggccatgtcgagcagagcctcgatacgctgctcaacaacgtgcggcgctgccgtgatcgcttgaacgccaattctttggcctcggggcgctaaatggacgcgctccgcatccaggtaccccacgagctcttcgctccggcggagagttctcattttgaaggctcgatcgccatccccgttatgaaggccggcccggatctgtacgatttcgcggggccgcttgcctggcaagcggacatctccaacaccggcgacgcgctcctggtcaccggcacggttgaaggcgaggccaaaacggcttgcgcgcgctgcctcgacgaggtttcgttcccggtgacgggcgagatcgaaggctattttctgctcgacgagacgaaggctgcgcccgaggatatggacgaggacgagttcgacgtgctgcccgccgacaaagtcattgacctggaaccgctcatcaccgcggcgctgctgctggagtttcctctgatcccgttgtgcgacgaggagtgcaagggcctctgcccccagtgcggcgcgaacctgaacgagggtccctgcggctgcgagcccgccgcagacgacgatgacgacatgccgccgaaccccttcgccgcgctcaaggactttcccttcgacgagccgcagaactagcttcgcacgaccgaacgcccgcccttcacggcgggcgttctttttttttctctccttgacaacccgtcgtgcgctctctagaatgctagttagttactcaagtaactaactagcagagaggaggcgcgccgcatgaacatcgacccgggaagcgacgtccccttgttcgtccagatcgccgagggtatcgaggaggatatcttcaccggctcgtacgccgagggagaccgcatcccgtcgaccaacgagctgtccgcgcttttgggcatcaatccgcacaccgtcctcaaaggcatgaacatcctcgtggacgagggcatcatctacaagagaagggggatgggcatgtacgtgcagacgggagccggcgagaaggtgcgcgccaagcgccgaaacgcgttcgacgagcggttcgtgcaagcgcttgtcgccgaggcgaagaagctcggcctgacgaaacagcaggtcgtcgacctggtggagaaaggatacgaccatgcgtgagatacgcgtcgaccatgtgtcgaagtcgttcggcaaggcgaaggcgctcgacgacgtgtcgctgtccttcgagcacgggaagatccatgcgctgctcggacgcaacggggcgggaaagtcgacgctgctcggcctcatcgcgaaccgcctggttcccacgagcggccgcatcttcgtggacggcgagcccgccgccgacaacgcgcgagccttggccaagctgtactgcatgaacgacaagaagatgtatcccgagaacctgcgcctcgacaacctgttcaaggagatggggcgcttctacgagggattcgaccggacggccgctgcgggctttgccgaggcgttcgggctggacctgcgcaagaagatcggatcgctgtccacgggctaccgctccatctaccagctggtcgtcgggctgtcgctggacgtggactacctgctgctcgacgagccggtgctgggcttggacgccaatcatcgcgagctgttctacaagctgctgctggacgattacctggagaagcagcgcacggtgatcatcgccacgcacctcatcgaggaggtggcgaacctcgtggagcaggtgaccatcgtcgaccgcggacgggtgctgctggcctcgtcggccgaggagctgcgcgcgagcggctacagcgtgtcggggcgcacggcggacgtggccgcctactgcgcggggatggaggtgctcgacgtggaggagctgggcggcttgagcgtggcgtacgtgcagggcaagcccgacgcggcgcgcctgaacgagcggctggacgtcgcgccgctcaacctgcagaagctgttcgtgaaactgaccgagaaggaggaagcgcgatgaggaagttcaaggcgatcgtccgctatcagatggccgacatcctgttctcgatgagcgtgttcttcatcgtgttcgcggtctgcttcgggctcgggtgggcgatcatcgcattcgccggcgaagggggcacgccgttcaagggcatgtacctgtggatgtgcgtgtttctgggtctgtgcggcggcatatcgtattccatcgacttcaagttcgcgctgcaatgcggcgtgacccgcgcccaggcgtatctgagcaccgcgctgtcgttcggcgtggtggcgctcgtcttcgccctggtcgaccagctgcttttggcggtgctgcccctgtggggcgagcagtcgatagtcgcgctgtacggcgagggctacgggccggggcttctcggcttcgcctggacgctcgcgttcaacctggccatcgtgtttctgtcctacgcgctggtggtgctgcacggacgcgtggggaaggctccgttcttgctggggcttctggcgttcggcctcctggcgttcgtgctggtgcccaccgtcttccaggtggtgccgggcgcggccgacgctgcaggggcggttcttctccctgcgctcgggttcacggctcaggggatcgtcctggcgaaccccatcgtgctgttcgccgtcgtcgccgtgctgtcggcgctcgccgcctacctgctgacgcgccgcgcggaagtgcgctgacgcctgcttccgacgctcccgataacgcatcttcgctccgaaacacgctccagacgctgaggcgtgtttttcgggcgaagatgcgcttcccgacccgccgcggcgcgccggcaacgcagcggctaacggagcgcgacggtgcggcaacctcctcccgccgcgcccgtccttccacacgacggctccgtaccatggagcggatgtgcaagcattcggagcatgacgggaggcgaggcgcgcgtggatgcacgcaacgatcggcgggagggaccttcgcgcgacggccgtacggccctcgggcggctctcgcggcgtgcgtcgttcgtcctcgttgcgggcgcagcgggcgcccctcgtccatcgtgctcactctgtccacggggttcgcgcaaagccttccggcccgttttccctggctgctgctggcgctgccggtcctcggcgcgctgtccgtggggctgtatcgtctgctgcgcctgcccgcggccctgaccaccgaaggcgtcgtcgacgagctgcgcgcgggccgtcgcgtcctgggaagccttacggtcgggatactgggcggcagctgccttacgctgctgggcggcggctcggtcggcatggaggcgggcgcgctgcagatgggcgcgtcgacgggctccgtgctgggccgcgcgttcaagctgccgcccgcgcgcggccgcgacggcgcttccgacggctatccgggcgccatcggcatggccgcggcgttcagcgccctgttcttcgccccgttggggtcgtgcatgttcgtgctggagctcgtgcgcttcgaccgcgcggtgctgcggcatgcgcccgccatgctggcagccgccctcgtcgcctacgccatcgcccgcgccgtcggcatcggcgaccatatcccgcgggtggcgctgcccggcctttcgtgggccgtcgccgcgcactgcctgctggtgggcctgtgctgcgccgtgggcggcgcgctgttcgccgcctgtctgcgcgcgctgcgccgcgcgtggcgccgccgggcaaaggctcgtccgttcgcgctggtggccgtgggcggccttgcgttcgcgggtatcgtgctggcatgcggctggcaggcgtcccagggcacgggcatgggccttctgcgcggggcgcttgcgggaagcgccgctccggccgacttcgccgtgaaggcggggctcaccgtgctcgtgctcggcttcggcttcaagggcggcgagatcatgcccatgttctccatcggagcgctgctgggctgctcgctggggctggccacgggcgcgccggcgggattctcggccgcgctcggcatggcggcgttcttcgcggccgccggccgctgcccgctgacggcgctgctcatgggcgccgagatattcggctgggcgtcgcttccgtttctgctgatagcggtggctgcggcgtacgccggcagctacgacgtgggcgtgttcggccgcggcgcggcaagcgagctcgcgcgcgtgcgccggcgtgcgcggcgcgacgagccgtcgctcgaggaggatcgatgaggatgcgcgagaacgagcggcaaccgcggcgccgcgtttacgcgaagcccgtgaagcgccgggccccgcgccgattcgaggcgctcggggctcgaaggagcggtacaatgtggggcatggaaaccctgaaaaagctcaagcagaaggcgggctcgcgcgaaaccgagccgtccgccggcgcggcgcctgcgcaaggcgccgcgtcctcgaccgccccggacgcgagcccggtctcggcgcgtcaggtgctcgcgaagttcgcgagctattatagaccctataccttcctgttcgtgttcgatctcgtgtgcgcgacggtgctggcctgcgtcgacttggcgttcccccagttcctgagcttcttcacgaaggacttcttccaaagttcgcctgaggctatcatcggctcgctttggtggatcgcgctcttgttcgtcgtgctgtacggcgtgcgcacggcctgccagtacttcatcaccagctggggtcacatcatgggcgcgcgcatggaggccgacatgcgtatggacctgttcaagcagtaccagcgcctgagcttctcctattacgatcgcaacaacaccggcgagatgatgagcaagctggtcaccgacctgttcgacatctcggagctggcccatcacgggccggagaacctgttcatctgcatcctcaagatcgtgggctcgttcgcgctgctgttcctgatcaacgtgccgctgaccgccatcatgctggtggcgacgctgcttctggccgcgtactcgttctggcgcaactaccagaagcgcgtcatcttcaccgagaaccgcaagaagatggccgacatcaacgcgcgcctgcaggactcgctcggcggcatccgcgtggtgaagtcgttcggcaacgagccggtggagatcaagaagttcgaccgcacgaacgcccgcttcgtggccacgaaggagagctcgtacaggttcatggggtcgtttcatgcggtgaactcgctgttcatcggcgtgctgtacacggttaccatcgtgggcggcggctacttcgtggccacgggcggccttgcggtgtcggatctggccatctacgcgctgtacatcggcatcttcatctcgcccatcgagcagctcatcaacttcgtcgagacgttccagaagggctacgccgggttccgccgcttcatggaggtgctggccgtgcgacccgacatcgccgacgcgcccgacgcggtggacctgggcgccgccgagcgcgcccgctgcggcggcccggatgggcacgtggccggcgaggtgcgctaccgcgacgtgcatttcagctacgacggcgtccacgaggtgctgcgcgggctggacctggccatcccggcgggcgcgacggtggcgctcgtggggccgtcgggaggcggcaagaccaccacgtgctcgctcttgccccgcttctacgatccggagcgcggctcggtggagatcgacggcatcgatatccgcgccgtcaccgtggagtcgctgcgcgacgccatcggcatcgtgcagcaggacgtgtacctgttcggcggcaccatccgcgacaacatcgcctacgggcgccccgacgccacgacggccgagatcgtggaggcggcgaagcgcgccaacatcgacgcattcgtgcgcgggctgtccgacggctacgacacctacgtgggcgagcgcggggctcgcctgtccggcgggcagaagcagcgcatcgccatcgcgtgcgtgttcctgaaggacccgcgcatcctcatcctcgacgaggccacgagcgcgctggacaacgagagcgagcgggccatccagaagtcgctcgaggagctgtccgccgggcgcacgacgctcgtcatcgcgcaccgcctgtccaccatacgcggcgccgacctcatcgcggtggtggaggacgggcgcgtggccgagcgcggcacgcacgagcaactgttggccctcggcggcacctacgcccactattatgaaatgcagttcggcccggtggagcagggcgcggttttgtgaaacctgggtgcggattggattttgcgggtgatcggggcttgcggcgcgggttctcgtttggtactataccgtttcgcgtgtttacttaagcgagaacgagcgatcgtgatcgctcggcttaaagaaggagatagagaatcatggcagtacctaagcgcaaaatgggccgtgcccgcacccacgcccgtcgcagcaccaacgacaagatcgcggcgccctcgcgttccgtgtgcccgcagtgcggcgaggtcaagcttccgcatcgcgtgtgcccgaactgcggcttctacaagaaccgcgaagttatcgagacggagtagcgtaccgctcatgcgcgcgcgttctgccgccgcgcattgacaagcctcctcgcacatcgcgcttcgcgtgcgatgcgccgggaggcttttcttgcattccgccgttctgcgaacggtggaaccgctcgacactgcgaggctttgatgcacctgatcttgcccttgcgcgtttcctcttcgcgtatcgaagcatgcttcctcgaaggggtcggcgctgcgccgcgtctgcgctggcgcaatatcaggtacctcaaagcctctcgctgaccgatacgcgagagtgaggttttcgatatgtctgacgaaaaggtcgttgttgccgtcgatgccatggggggcgacgatgctcccggcgtggtgctcgacggcgtcgcccaggcgcttgcctccgaccctgccctcgagatcgtcctgtgcgggcctgccgacgtggtggagccgttcgccgccgcccacgagcgctgcacgccgcaggcatgcagcgaggtcatcgccatggcggagcatccggcgaacgccgtgcgcaagaagaaggactcgtccatcgtcgtgggctgccgcctcgtgaaggagggcgcggcgcaaggcttcttctctgccgggtcaaccggtgcctgcctggccgcaggcacgttggtgatgggtcgcatcaagggcgtcgcccgccctgcgctggccacggtcatcccgtcgcccgtgcgacccgtcgtcatgtgcgacatcggggcgaacgccgactgcaaacccgagtacctcgtacagttcggccagatggcgtcgatctacgcggagaaggttatcggcatcgagcatcctcgcgccgcgctgctcaacatcggcgaggaggacacgaagggctcgcagttcgcgcaagaagcgcacggcctgctgagggagcggctgtcgaacttcgcaggcaacgcggagggctccgatatccttcctgcgaacttcgacgtcatcatcaccgacggcttcacgggcaacgtatgcctgaagaccatcgagggcacgtcgaagaccctgttcaagacgctcaagagcatcatgatgtccacgccgctcacgaagctgggcgctctggccataaaaggaggcttgaagcagctcatggcgcaggtgagccccgatacgtacggcggcgcccctcttctgggcgtgaagggcgcgcttctggtggggcacggctcgtccaacgcgctggcggtgaagaacggcgtgctgaccacggctcgcatcgcgcgaaccggcgtatctgatataatcgcgcaaacggtggcaacgccctgcgccgccgaagcgacggagggcgagtaggccatgcccgatcaatcgtggagcccttcccctgcacctcgtcagcagcctgaacgaaagcccgagcatgccatgaccttcaccgatgaacagcagagaaaactggcggtagcgcaggaaatcctcggctaccgtttcgcggacgagcagctgctgctttcggctatcacgcatccttccgccaccgagggcaaatcggtcaagtactcctatgaacgcctcgagttcctgggcgacagcattctgggcgccatcgtggccaccatcgcgttcgatcggttccatgatctggacgaaggcggtctgacccgcatcaaggttgcgctcgtgtcgggcgcgagcctctccgacgtcgccgagcgactgggcttcgccgacgtcatcgtgttcggctcttccgagacgggcacggggcggcgcgggctgcattccgcgctggagaacgtgtacgaggccgtggtggccgcgttgttcttggacggcggcatcgaggctgcggagggtttcgtgcgcgccacgttgatcccccgcatgtcggccgacatggcgcgcgagcccgagaatcccaagagcgccctgcaggagaagctgcaggaagacggcatcacgcccacgtacaaactggtggagacccaaggcccgccgcacgaccgcacgttcgtcgcgcaggtgttcgccggcagccaggggcttgcccgcggcacgggtcgtacgaagaaggaagccgagagccaggctgccaagagcacgctcgcccgcctgggcgagttcttcggcctgggagtggacggcgaggctcgcgcggagaaggccgaggccgccaaacaggccaaggcggagaaggctgccgcgcgcgccgaggagaaggcccgcaagaagtccgagcgcgagcgcgcgaagcagcgcaagcaggggtagccgttccatgtatctgaaatcgctggtcctcaagggtttcaaatcgttcgccgatcgcagcgtgctggcgctcgagccgggcatcatcgccgtggtggggccgaacggctcgggcaagtcgaacatctcggacgccgtgctgtgggtgctgggcgaacgcaacgcgaagcacctgcgcggccaggcgatggaggacgtcatcttcgccggatcgtctgcgcgcaagagcgtgggcatcgcggaggtggatctcgtgctggacaactcggacggcacgctgccggtggacttcgacgaggtggccgtcaccaggcgcatgtaccgctcgggcgagagcgagtacttgatcaacggcgtggtggcgcgccgcatggacgtgctcgacatcctgcacgactcagggctgggcacggggacgcactccatcatctcgcagggcagcttggactccatcctgcagtcgaagccggaggatcgccgggctctcatcgaggaggccgccggcgtgttgaagcacaagcagcgcaaggcgaaaagcgagcgcaagctggcggccatggacgcgcacctggcccgcgtgaaggacgtggccgccgaggtggagcgtcagctggggccgctggagcgcaaggcgaagcgcgcccgcacctaccaggggctggccgacgagctggcggatctgagcctgtccctcgcagtggacgaccttcgcacgctgcgccgcgggtgggacgacgcgctcgcgcgcgagcgggcgctggaagcggagttggaggagaagcgcgccgccatcgcccaggccgaggccgcggccgaggagctgcaggagaagatccgccgcgagagcgtggacgcgggagagctggcccgccggcaccgccgcgcctcttcggccgtcgagcgtttcgacggtgcgacgctgctgctgcacgagaagcgccgtgccgcccagagctacgaggccgagctgcgcgtgacgcttgaggccaatgctgcgaagcgcgcgcaggccgaagccgatcgcgcgcaggccgtcgagcagctggccgaggtgcagcgcgaccgcgagcaggccgatgcgaacgtggcgcgcctggcctccgagcagtccgaaaacgcgcagaagcgccgcttgctcgagcgcgaggccgaggagctggagcgcgcgaagcgcgacggcgagcgtgcgcaggagcaggcgcgccgcgagctggccgaaacgcaggaggcgctgaccagcggccttgcgcatgtgaagctgatcgagggtcatggcaaggagctggagctgcagctggagcgcgcgaagggggaggccgtgtcgctcgcggaggccgcgacgcaggccgggcaggcgctcgaggcgctcgtcgaggccgagggcgccgcgcgcgcccgcgtgggcgaggcgttgggcgcgcgcgagacggcgcgcggcgcgctggacgaggcgcgcgacgcggcatcgcttctggcatccgagatcaaggggctcgaagaggtcgagcgcgcgagcgcagccgtgggcccggcgcgcgcttggcttatggatcatgccgtcgacctggacgtgaacctcgctcccatcgcgcacgtcgtgcgcgcctcggcgggcttcgaggcgctcgtggagcggctgctgggggcggacgtgtcggcgctgttggtggacgacgccgcgcgggcgaacgccgtggcggcggcgctggcggcgcgcgacgagcagggcgaggtggtgctcgtgccgcgcgcgggcgaggcgcgccgcgcgtgccctgcgcgcgaggcggccgctgccggcctcgggcgcgcgctcgtcgacgagctggcgtacgcggacgaggacgccgcggcggtggaagcgctgctgggagacgtggcggtatgcgacgacgtcgacgcggcgttcgccgcgcatgcgcgcggggcggaaggcgtgcgtttcgtgacgcgcggcggatgcgtcgtgtggccgaacggcaaggtgaccttgggcgccgcggcggttgacgacgaggaaggcgtgctcgcgcgcgctcgccgcctggaggagctgcgcgcgcagctgcgcgccgcggagagcgagcgggcgagcgcggaggagcgtgcggcggcagccgaggaggccctgcgcgcagcgcaaggcgagagcctgcgcctgtcgcaggagctggccgagctgcgcggcaagaccgattcggctcgcgccgaggcgcgtcgcgccgaagagaagctggcggccgtgcgccgcgagttcgaggacatcgagcgccagcgcggcgaggccgagcgcaccgtggctcaagcgcgcccctcggtggaggcgctcgagcagaagctggccgctctcaagcaggagttggagtcggcagccgcgcgctacgagaaagcgcaggaggcggtggtgccgcttcgcaaggaggccgcgcgcctgcgcgacgcgctgtccgaagccaagctcaaggccgccacgctttccgagcggcagacgtacacgagccgcgtggtggacgcgcgcacgcgcgatttggaggccgtggcgtcgagcgacgccgaggcgcgcgagagcctcgtgaagaagcaggtggcgcagcggcgcatcgagcccttgctcgcgctgttcgaagagctcgtggccagcgcccgtcgctggacgcgcgacctcgaggaggcggccaccgctgcgcaagattcctcgacgggtctgcacaacgccgtgaacgaggcgcgcgcccgagcgcgagccgcccatgacgccttcgacgacgccaacgcgcgcctgtccgccgcgcgcgtggacaagggacgcttggaagtgcaggtggacgcggcggtgaacgccatcgtccacgactgcaaggttccgctcgaccgcgcgctcgagactccggagttggaggatcgcggcgccaccgaggacgcggcgttcaagctgcgacgccgcatcgcgaacatgggcaccatcaacccggacgccgccgaggagtacgagcagctcaagacgcgctacgactacctggccgcgcagctttcggacctggacggcgcgcgccgctcgctcgccaagatcgtccgcgtcatcgacgcgcgcatgaaggacgacttcgtacgcactttcgaagcggtgaacaagaacttcagcgagatattcgccgtgctgttcccgggcggctcggccgagctcacgctcgtggatcccgacgatttggagaatacgggcgttgaggtgacggcgcagcctcgcggcaagcgcatcacgaagatgatgctcatgtcgggcggcgagaagtcgctcacggcgctcgcgctcctgttcgcggtgtaccgcatccgcacgacgccgttctacatcctcgacgaggtggaggccgcgctcgacgactcgaacctgcgccgtctcacgatgtacctcgacacgcttcgcgacaccacgcagctcatcatgatcacgcaccagcggcgcaccatggagatggccgatatgctgttcggcgtgtccatgcaggcggacggcgtgacgaaggtagtcagccagaagctcgagaacgcgctgcggcacgcggaatagcttttgacctgcgtgttgcgaaggccggcgggcatgccgtgctcaaacagtcctgagctcgcacgaaacgcccgctgggcgtttcggctcgtgcggaactgcgcgcggcacgcccgccggccttccttcatgtagaacgcgttccgaaccggtgacgtttcgagcttctggctgcgagaggaggagatgaggatgagacggaggggcggggtaagtgtctcatcctccggttgcggatcgctacttcactagcacgtggacgatggtggcggctgcccagaggaacagcagcacgcagttggtcttcgctagcacgtcgagcaccttgttagacagcttctcgcctttgatcagcacgtccgcgttcaacagcgagaacatgagtatcacgagcgaatagctggacatgttgccctcgttgcccgtgaaaagggagtggaagaacccgatccacagaaggggcagggcgatcagcgtgatgatccggaacgcccggttgccgcgctccttgccccaaggggagctttctcctgatgcgaaatttcctgctgcctgctcgcttgcagccgacgcttccaaacgctcttcagccatgatgggacgctccatttccagatagagtatagtgggaagatcgaagattgttcgcttgcaagcaggctcattgtagcatagtatccatcatggatatacgagaggaacgaaatggcgaagaagagcccgtacgagacgggggagctgtccgacagcatcttcctgatcctgctggctacgctcgagccggtgcacggctaccggatcatgcagggcgtcgaggagtccacggacggcgcggtgaagatcgggccggccaccatgtacacgacgctcaagaagctcaaggcggcggggtggatcgtcgagatcgccgaggacgagagccgcatcctgtacgcggccaccgacgaggggcgcgcggtgctcgagcgcgatttcgttcggcgcaagcggctggtcgccttcgcggaggcgcagctgggagaggcgggcgaggagaaccatggctagataccggttgtgcggcgggttggccattatgccggagcacgacatggcgatgctcgcggacatgagcgcgcggggatggcatctgagcgggttctcgtgcgggatcctgtaccgcttcgaggcgggcgagccccatgcttacgactacgcggtggacttccagcgcgacttctcggcggaggcgcaggagctgtaccgcatcggcggctggcagagcgtggcgctggggtcgtcgtggcagatcgtgcgcgccgaggccggcgccgtcccgctgtacaccgacgacgacgcgcaggccgagacgatcggcgcgagccgggcgggcttgggctgggcggcgctcgtctgcgcgctggcggcggcgctgctcttcgcgttgcaggcgcggctctccgcccaaggcaacgtgccggggtcgtgggcgtgcctcgcggcctgcgcggtgttcgccgccgggttcgtgttctcgttcttccccttcgtcggctatacgcgctcgttgcgcaagatgcgcagggagcaggaggaggatccgcgccgctgacgcgcggccctatttgggatacactgttcaggcgaccaagaaaggagcccgacatgggatttttcgataggatcagcgaggggcttacccgctcgcgcgacaagttcaaggagcagatgaacgtcctgctcgaccgcggccccgatctcgacgaggagttctgggacggcctcgaggagacgctcatcctggccgacgtcgggggcgccgcggccgccgagatcgtggagggtctgcgcgatcaggccacgcgcaaggcgctgcccgacgcctacgccgtgctcgacctgctgaacgaccagatcgcctccacgttcacggaaggcggcgaggacgtgctgggcggtcagcccgcgctcgtgctgttcgtgggcatcaacggtaccggcaagaccaccacggtgggcaagctggcgaaggaggcgaccgacgcaggccgcacggtcatcctcggcagcgccgacacgttccgcgcggcggccatcgagcagctggaggtgtgggcggagcgcgcgaacgtcgaggtggtcacccgcgagcgcggcagcgatccggccagcgtgtgctacgacaccatcgagcgcgccgagagccgcggcgccgacctcgtgctcatcgacacggcggggcgccttcacacgtcggccgacctcatgcgcgagctggagaaagtggtgaacgtggtgcgcaagcgttcgcagctgcctgtgtacaccgtgctggtcaccgatgccaccaccggccagaacggcctttctcaggcgcgcgagttcgaccgcgcgctcgatttggacggcgtcatcgtcacgaagctcgacggcaccgccaagggcggcatcgcgctggccgtgtcccacgaactggggcttcccgtgctcaagatcggcgtgggcgagggattggacgacctgcgcgacttcgacgcgcacgatttcgcccgcgcgctcgtaggcgagttcgacgagcgggcgtagcatggcgttcgtccaggtccatcatgaccccgacgtgctcgaggtgcgcgtgccgtttcagaacatctccacgaacgacacgaactgttacatcgtgaaggacggcgacgagacgctcgtcatcgacaccggagcgccgtcggacgagggcttcgctatcctcgatgctgcgttgaccgagctcgatgtcgaccgcacgcggatgcgcttcttcctcacgcacctgcatctcgaccatgcggggctggtcgaccgcttggcgctgcccggcgcgaagctgtacgtgagccccgtggacttcgagtcggtgcgcgcgtcgcgcgcggcttcatcctatgatgcggcgcggcgcgcgttcacggccgagggcgtgccgccgtccgacgcgtcggggtacgcgcgctacgccgtggagccgcgcctgttcgacgcctcgcgactggagctcgtggcgtcgtgcgacggcgatgccatcgaggtggggcgctaccggtttcgcgtggtggagacgcccggacacacgcccgggcacttggcgctctacgagcccgaatcgcgcatcctgttcggcggcgaccacgtgctgttcgtcatatcgcccagcatcgcgctgttccccgacggagcggacgggttgcaggcctacctcgacagcctggacaaggtgcgggcgctgcgctgcgagaaactgttcgtcgcgcacggcgagccgcgcgacgatttcgacgagcgcatcggctggctgcgcgatcaccacctggagcgcctggaggagacgtgcggcatcgtgcgcgaccggccggggctggccggcgaggaggtcatccgcgccatcaagtggaacgtcccgtatcccacctgggaggagatatcctttgtgcagcgctggtgcatcgtcaccgagggcgtcgtcatcctcaaccacctggtcggcagcggcgccatccgccgcgagaaggacgaatcggggatcaatcggtatttctaaagggcggcgtatccgagcgcgagacgcctttcggcgccgtacgttggaaaagcgttccgaacgcgcttcgcggcgcgatggtagaatgagcgcatggaggaaacgcggacatacctgctgaagctctacgacgacgacctcgcgtcgttcaccttggtgcgcgacgcgagcggcgccgtgcgttgcgcgagcgcggaatgcgacgagtcgaagcgcgggctgctgccgtttcgcgtgacgggcgacgcggcttcgttcgagcggtggatcgaatcgcgcaccctttcgaagaaccggacgttcgcctcccgtatcgtgcgccagtacggcatacggttcgacgacgcgatgcagatgctcgacgcgtgcaacggcctttcgctcaacgatgcgtattgggtcgttcccgacgggtcgaaggcgatgttcgcggagaagaacctgtacgagaatccgttcgacgagctcgtcgccacggcggcgttctcgggcgtgatcgacacgtcgagggtgccggagggactgtcgggcgagctgaccacgagcggccagtttccgaaagcctggcgcgtcgtcgacggcgagcgctatctgtacaaggccggcgctcccaactcgaacgggctcgagccccatgccgagtactatgcggcgcagctggccgaagccctgggcttttcccatgcgtcctacgatctggcgcgatggcatggcgagttgtgcagcgccagccccttgttcacgagtcgcgacaccggcttcgcgacgttctccagcatgttcggcacgctgtcgttcgacgaggtggcggcggtctacgtcgaacaggggacggaggcgttcgagcgtttctcggaaatgacggtcttcgacgcgctgatcgccaacgacgatcgtcatcttgggaacttcggattcctgttcgacaaccggacgcgctcgctcgtttccgctgcgcccatcttcgacaacaacctgtcgctgttcatccgcgacatcgacgcgggtttgacggcttccgacctggatcgatcagccgcgtggtacaagagcccgtcgaacgtgctgctggattatcaggcgaaacgcgtgatgacggacgacctgcgcgatcgtctcgcgacgctgcgcggcttcgagtttgctccgcactccgacttcccgctcgacgagcggtatacggagcttttgaacggctacatccgcttgcggttggaagcgttgttgggactgtcctgatcttgcgttcctgaagattatggcgtggttgaatcggctgtctgcaaagctggtttttagaaatctatgagatctttgaccttgatatcgagtccatcggcaatcctgcacaagagatcgatcccgacgctcacctggccgcactcgatttgccataagtgagtttggttcgtacccaccataagagcgaaacgacgttgggaaaggtgttgctcctcgcgcagcatctttattgtcttgcccagtattattctacggccgtcgcttttcatggtttcagagtatgtgctacacttcctttgatgacttgctataacaagtcatcaaaggaagtgtacaaggctcggattaattcgattagagcgactagtggaaagcagttgcgctttgttaaggaggggcggagtgaaaacgatgaggggtctaacgactgcttttagcttgatcgctgtactttgcttgttcggatgttcgggcaacggagtccatgatgcaggtgatgaagagcaagaagatgctaatttgcaacctgcgttcgtgttaaaaagcatcgatgctcacgctacaattcatgatggtagtgcggtcaacgtggttcagaatatagcaaccatggaactcgacgatagaggaaatgttatccgagcggtttatcgcaaccaggacagcggctccgatatcgtggtcgtcgagtcggagttcgatgagaggggttttccagtcggacgaatcgttgagaagaagttgtcagacgaaactgcaggtaccgtcgtaacttcgacgaggttccaatgcactccggacggcgaagggcgactattaagtgctgagtgggaatctgaagtgagctttggctccgataaagttactcgtgcttctggcgtggatcgctactcgtatagtccagaaggtggtttggcggaaatatcaagcgaatcgaaaacggaaaatggggaaagctatgcgagatcgtcgtgttatgacgaaaccgggtttcttatcggcgtgagcggcaactacgaagatgatagctactcgaagtcatgcgaatacgatgagtctggtagattggtcgctgtttctgtatctcaagaaggtcttggagtgattgaggagcgcgctttcgcttatgatgactacggaaatctcaaatccatttcgatagctaatgcatatgcttcagcttactcttttgagtatgaataccaaaaagtagaaaatccttcaacaatggcttcgattctgtcgcgtgcaggacagacgatgtttggccaattgacgtagaatgcgctaccgcataagtttttcgtatccaacgctcttgtgaaagtgcatctgaaaaatgaatagaggaacggctttgaagatcttttactttttcgaaagggatgtcgatcgaggttcgggtagctttgctgcgggatgcttgttggcagtgttgtccatagtctttatgataggcgttcctgcgcttttgcccgcgtatttcatgtcctacagcatagaagaagctgagaaggtcgctatggctttcgtgttagggagtggtttgctgacccttgtgattgctgcgactgccttgactttatgttgtaagacgagcagaagcttttcagaccttttcatatcttgtttctgtccgaccgcagtcgtttcaagcatcgtctattgtgctggctattggactgccgaagggcatacgagtgatgctgatattgtccctatgatattctcgagtttgatcatgtgcttgccgatgttcgcgataccggcaggtattgccgcgtcgatagtattcttgattattcgcaggaaagctcatgtatgttaaaacggtggggcagaaatgagagcctgtcgtcattttccttccgctgcgttctgtcgaagggttcgcgcgcgtttgctctgacggtcgtggacaggtgacattttgcgacgagtactatggtgatacgttctgcggaagcatttcttttgggtacgatgcaagaggaaatctggaacgcatggaatacgaaaacggatcgtgcgttacgtttgagtacgaagaagaaaacgagctccatcctttcgatcttgcgatttccagggtgattccgatgaagagcttataaccgtccgaacgcgttggtttgctcgatggcaataaagtattccgaatgcggaatactttattgtttcctgtttgaaaaagtattccgcaacggatgcctccgcggcggatggttctgacgagcgctcggattgcttgtgtgtttgtggctcggcgggtcttgctggcgtataattccatgcattacgctcaatcgacgcatacgacgaggagtcatctaccatgctcgagaacctatcgacgcgcctgcagggcatattcagcggtctgcgcggcaagggtcgcctgaccgaggacgatatcaacgacgccatgcgcgagatccgcatggcgcttctggaagcggacgtcaacttcaaggtggtgaagtcgttcgtcgcccgcacgaaggagcgctgcctcgacgccgaggtgctcgattcgctcacgccggcgcagaacgtcatcaagatcgtgctcgacgagctgaccgagctgttgggccgcaccgacagcaagctcgtcctgagcagccgcatccccaacgtcatcatgctggtaggcctgcagggctccggcaagacgacggctgccgcgaagctggcctaccgcctgaagcaggagaaccattcgcccctgctcgtggcctgcgacgtgtaccgccccgccgcggccgaccagctggaaaccctcggcggcgagatcggcgtgcgcgtgtaccgcggcgacggccaggatccggtgaagatcgcgcaggagggcatccaggacgccatcgacaacctgcgcgacgtggtcatcgtggacacggcgggccgtctgcacgtggacgacgagatgatggacgaggccgagaacatcaagcgcgccgtgaagcccgaccagatcctcatggtggtggacgccatgaccggccaggacgtggtgaacgtggccagcgcgttctcccagcgcgtcgacttcgacggcgtcatcatgtcgaagatggacggcgacgcccgcggcggcggcgcgctttccatcaagcaggtcaccggcaagcctatcaagttcatctcgtccggcgagaagccggactcgctcgaagagttccaccccgaccgcatggcgaagcgcatcctggggatgggcgacgtggtcagcctcatcgagagcgccgtcaaggtgcagcaggaggaagtggagcaggagcaagccgagcgcatgatgcgcgcgaacctcacgctcaacgacttcatcgatatgaaccgacagatccgcaagatgggcggcgtgtcgaagctgctgtcggccttgccgggcggcgacaaggccatggccgccggccaggtggacgagaatgcgttcgaccacatggaggtcatcatcaactccatgtcgaaggccgagcgcgagaagcccgagctgttgaacggctcgcgccgcgcgcgcatcgcggccggtgcaggcgtgagcgtctcggacgtgaaccagctcatgaagaagttcaacgagacgaagaagatgatgaagaagatgatgcctgccgtggaggagatgcagggcggcaagaaggggaagaaggggaagaaaggccgcaggcgccgcatgggactgcccggcggcatgggcggcatgaacatggccgacctcaagaagctccaggacatgctgggcgagtagcggttcgtcctcgtaggatcgatcgggcgcgaggttccgcaagggttcttctcgcgcacacgcaacgaaaggaggcgcatatggcgttggagatacggccgtaccgcgaggaggatctcgcgggcatgatcaaggtatggaacgaagtagtggaggcgggggaggcgttcccgcaagtcgagcccctcaccatggagacggcgcgcgcgttcttcgccgagcagacgctgaccacggtggctgcgatcgacgacaagctgttcggcctgtacatcctgcatccgaacaacgtggggcgctgcgtgcacgtggccaacgccagctacgccgtggcgtccagcgcgcgcggcttggggctgggccgcgagctcgtgaaggactcgcttgcgcaggccgcccgcaagggcttccgcggcctgcagttcaacgccgtggtggcttcgaacgaggccgccatccacctgtacgagtacctcggattcacgcgcgtgggcaccatacccggcggcttctgcagcatactgggcaatttcgaggacatgcacatctattacaaggattgcttcggcgcggcgcttcccagctgaggttagccacgcgcccggtccgagcgcgccttgtcgccgcatgcgcatcttcgctccgaaaacacgcctcagcgcgtggagcgtgttttcggagcgaagatgcatgcgttgcatgcctcgctgcccgccaaacgtgggattttcgaggatgcgggaggtcggggatgcgctcgtaagtccggcgcgttacaattctgcttggtaatcgcttgtcaaacagcagattacgccgtatcataagcaattgctgttttcgctgcaccgcatacgcgctgcacgcatcgaatcgaatgtaagaagcaaaaggagttcatcttcatggcagtcaaaattcgcctggcccgtcacggcgccaagaagcgcccgtactaccgcatcgtcgttgccgattcccgctgcccgcgcgacggcaagttcatcgaggaagtgggtcgctacaacccctgcaccgagcctgccatggtgcagttcgacctggagaaggtcgaccagtggatcaagaacggcgcccagccgaccgatacggttgccagcctgctgaagcgcgctcgcgagaacgcgtaagcatcatggccgagcagacggaagacatcgtcggtctcgtcgagtccgtcgtgcgcccgctcgtcgagtttcccgacgatctggagatcacgtcgagcgatgccgaggacggttctattctcgtcgaagttcgcgtgaacgaagaagatgccggcaaggtcatcggtcgccaggggcgggtcatcaaggccatccgcacgttggcgcgtgccgctgcatcgcgtacgaacacccatgtcgaagtggagcttctcgactaaatgcgtacgtgggcgaacgttgccgagctatctaaaacgaagaccttgacaggagggctcgtcgcgcgctgcgcgccgggtcttccttttttgctggaagagggcatggaggtggccttcgtgccgcctcggcacgatgcgccgcgccgtgcgcgcgtgctgtccgtgcaggacgcgggcagagacgccttcctcgtgacgttcgaaggcgtcgactccatcgacatcgccgagttgttggtggggtgcagctgcctcgtacgccgcgccgatctgcccgaaagcgcgctggccgccgaggccgacggcttggaaggctttgaagtgcacgacgcgcgcgcgggcttcgtgggcgtcgtggagtcggtggtggagaatcccgggcagttcctgctgagcgtcgcgcccgccgacgggggcaggcgcgtgctcgtgccgcttgtggacgcgctggtcgtcggtttggacgaggacgcgcgccgcatcgacgtcgacttgccggacggcctgctggacctgtagcgggccgcgccctcgcccccgcgcccgaaaggacccgcccgtgatcatcgaaacgttgtcgacgttccccgacatgtacgcctccgtcatgggctcctccatgatgcgcatcgcccaggagaagggcatcctcgagttcaaggcgcacgatctgcgcgactggacccacgatcgccaccgcaccaccgacgacgacccgtacgggggcggcgacggcctggtgatgaagtgcgagcccatcttcgaggcctacgacgacatcgcgggcgcgggcccgcgcccgaccaccgtgttcctgtcgccgtgcggtgagccgttcacggacgccgtggcatgcgagctgtcgcgcgaggagcgcctgctgttcgtgtgcggccactacgaaggcatcgacgagcgcgcctacgcgctggccgatcgcgtgatctcgctgggcgactacgttctgaccagcggggagctggcctccatggtggtcatcgacgccgccgtgcgcaagctgcccggcgtgctgggcgccgagacgggcgccctgggcgagagcttcgccgacggcttgttggaatatccccagtacacgcgtccggcgacgtttcgcggcatgggcgtgccgccggtgctgctgtcgggcaaccacgcggccgtagccgactggcgccgcaagcagagcctcgagcgcaccgcgcgcctgcgacccgatctgctcgaggacgtcgatctgagcgcggccgatcgcgcctatcttaaggatctgggcctgtgaattccggagagcacgctgcgtaccagaagcccggcatcctgcgccgcttcttcggcctgctcgcttggacgggcttcgttgcgctgctgtcgtggctgacgttcgtgtacgtggggcacgcttatgctgttcccaccggctcgatggaaaagaccatcatgaccggcgaccgcgtgcttgctgagaaggtgagctactacctgcgtgacccggagcccggcgacatcgttatgttcgaagaccccgatatccccggccgcctgctgctcaagcgctgcatcgccgtgggcgggcagaccgtggacatcaacgacgaggacggcctcgtgtacgtggacggcgtcgcgctgcgcgagccctacaccgacggcctgcccacgtacacgcttgccagcgacgtctcctacccctacacggtgcccgaaggcatgatgtggatgatgggcgacaaccgaacgaactcgcaagattcgcgttacttcggcgccgtgtccgtcgcgtcggcggaggcgcgcagcgtggcggtgctctggcccttgggcgacgtgggcctgctgggatagcctcccgcctctcgcgtcgcgagggtttcgcccggtgatcgggaatttctgcaaactttgtcgaacgcgccggacgaattgcgccgacgcgctatcatatacgctcgtgatcttgttcgggcgccgagcgcccgcttcgaaaggatagacagactacatggattccggacagcacgccgaccgccagagcccgggcatactcagaaccttcctcagcctgctggtcatggtggccttcgtattcgggctgtcgtgggtgctgcgcacgtacgtgttccaggcttacgagatcccctcgggctccatggaggagaccatcatggtgggggacatggtgttctccgagaaggtgagctactacttccgcgaccccgagccgggcgatatcgtgacgttccaggatcccgagatccccgggcgcgtgctcatcaagcgctgcatcgccgcgggcgggcagaccgtggacatcaacgacgaggacggcctcgtgtacgtggacggcgtggcgctgtccgaaccgtacacccgcggtttgccctcctacacgctggccagcgacgtctcctatccctacacggtgcccgagggctatctgtggatgatgggggacaaccgcacgaattcgcaggattctcgattcttcggagccatacccgtctcctcggtgacgggaaggggcgctttggtgtactggccgctcaatgatttcagcctactcgactagcgcacgcggccgaggggtacgggtttgatcgagacaaggagaaccatgtcaaccgaacatgcatccgccgctgcggagcagggggctgcagcgcagctccctccgacgttccaggacgtcatcatgaacctccagcgatactggggggaccagggctgcgtcgtcttgcagccctacgacaacgaggtgggcgccggcaccaacgccccggccaccacgctgcgctcgcttggccccgacacgtggcgcacctgctacgtgcagggcagccgccgtccgacggacggccgctacggcgagaacccgaaccgcacccagcactacttccagttccaggtgctcatgaagccctcgcccgacaacatccaggagctgtacctggggtcgttgcgcgccatcggcatcgacgtggacgcgcacgacgtgcgcttcgtcgaggacgactgggaaagccccacgctgggcgcctgggggctgggctgggaagtgtggatcgacggcatggaagtgacgcagttcacctacttccagcaggtgggcggcttcgagtgcaaccccgtgccggtggagatcgcctacggcctggagcgcctgacgatgtacatccagggcgtggacagcatgttcgacatcgtgtggagccgcggcgccgacggcgtgaacttcacctacggcgacgtgtacctggagaacgagcgccagtactcgcgctacaacttcgaggtggccgacaccgatttcctgttccaggagttcaacgaccgcgaggccgagtgcctgcgcacgctggaggcgggcctgccgctgccggcctacgacagcgtgctgaagtgctgccacgcgttcaacctgctggacgcgcgcggcgtgatatcggccaccgagcgcatggcctacatcctgcgcgtgcgcaccatcgccaaggcggtgtgcgcctcgtacatggagcacgtggtgggcatcaagcccgccgaggacgacgaagcagggaaggaggccggacgatgagcagcctgcatacgcttgcgttcgagatcggcaccgaggagattccggcgttcgacctgcaccgcgcgaccctccagctggagaagctggtgcccgaggccctggacgcggtgcgcatcccgcacggcgatgtggccgtctacaccacgccgcgccggctcatcgccatcgtggccgatgtagccgacgagaccgaggcgctcgaagaggtgttccgcggcccgtccgtcaagatcgccttcgacgccgacggcaacccgacgaaggccgccacgggcttcgcgcgcggcaagggcgtgggcgtggacgcgctcgaacgccgcgaggagaacggcgtggagtacgtgttcgccacgaagagcatcgccgcccgcgacgtggccgagctgctgcccggcgtgctggaaggcgtgatcacgggcacctcgtggccgaagtcgtgccgctggggcactacgagcgagtacttctcgcggccggtgcgctggctcgtggcgttgttggacgagcgcgtgatccccgtgcggttcgcgggccttacggccggcaacctcacgcgcggccatcgcttcctagcccccgggccgcacgaggtggccacggccgccgatctgctaggcgtcgtcgaggccgcgcacgtggtgtcgagcgagcaggcgcgcgaggcggtcatccgcgagggcgtggcgcaggccgagcagcgcacgggcgcccgcgccgagcttcccgagaagacgcttctggaggttgtgaacctctgcgagcagcccacggtgctggtgggcacgttcgacgaggagtttctgcgcgtccccgaggagatcatcgtcgacgccatgctcatgcaccagcgttacttcccgctgtacgacgcggacggcaagctgaccaacaacttcatcgtcgtgtcgaacggcgacccggcgcacgccgacaccatcacgggcggcaacgagcgcgtggtgcgcgcccgcctgtccgacgcgaagttcttctacgaggaggatctcaagcatccgctggagacgtacgtcgaccgcctggacgaggtggtgttccaggagacgctgggcaccatgaaggagaaggccgaccgcatcgtggccctggcgaagcatctggccgccgacgcgcagctgagcgaggcggacgccgccgacgccgagcgcgccgcgtacctggcgaaggccgacctcgtgacgaacgccgtggtggagttcaccagcgtgcagggcgtcatgggctcctactacgccgccgcctgcggcgagagcgaccaggtggcccgcgccatcgccgaccattatcgcccgcgcttctccggcgacgagcctcccgcgtcggacgtgggacggatcgtggccatggccgacaagctggacaccgtctgcggcctgttcgccgtgggccagggtcccaccggctcgtccgatccgttcgcgttgcgccgcagcgccatcggcatcgtggccatgttggaagcgggcctgcccgtgtcgttggccgccgccatcgatgcggcgctcggcacctaccaggatgccggaatcgacttcgaccgcgatgcgatccgcgccgaggtggccgacttcttcgtgacgcgcacgaaggtcatgctgcgcgacggcggctgctctcatgacactatggacgccgtgttggcaaccggcgtggaggagcctgcgcagatcatcgcccgcacttatgtgcttgaggcggagcgtttgggtgctcccgaagcgttcgacgatttggccacggcctacgcccgtgcgaacaacctgcgcgacgccgatctgggcgtcgaggtagacgaagcgctgctatccgacgccgagcgcgcgcttctggccgccaccgacgaggctgctgcttgcgtgaaggaggctctcgctgtcgatcatttcggtgccgccctcgccgccctcgcggcgctgcgcgcgcccatcgacgcgttcttcgaggacgtgctcatcatggacgacgacctcgccctgcgcgagaaccgcctgcgcctgctcaaccgtttcgtcgccgtgttcgcccatgtggccgacttcggcaagatggccaagggcgcgaagtagtccatggacgaattcatcgcctacggaagctccaccgagttgcccacgatccacgtgatcagcgactcggtgggtctgacggcccaggcggtggcccgtgcggccgccgcccagttcggcgtcacgaaccccgtcatcgaggtgctgccgaaggtgcgcacgttcgaggagatcaaggagttcatcgacgagcacagcgccgtgcacaagcgcaacaccggcgatgggcgcatgctcgtgttctacacgctcgtcgaccgcgacctctcgcgccaactggccgaatacgccggcggtcgcgatgacatcgtggcggtcgacctcgtgacggacgccatcggcgccatcgcgcacatgacgggcaagcagccgtccacgaagccgggcggcctgcacgttgccgaccagtactacttccggcgcatcgaggccatcgagttcaccatcgcccacgacgacggccgcaacccgcaggagctccaccaggccgacatcgtgcttctgggcgtgtcgcgctcgtcgaagacgcccacgtccatctacctgtcgcagcagggctacaaagtggcgaacatccccctcgatcccaccaccgagcctccggcggagctcgagcaggtcgaccgcacgcggctgttcggattgatgacgacgcccgaggtgctcatcggcattcggcagcgccgtttggggcgcgcgagtgccgtcgcttcgcgctatgccgatcccgaatacgtgtaccgggacttggaggacgcccgcgcgctcatgcgcaaactgggctgtattgtcatccacaccgaaaaacgtgccgttgaggaaacggcgcaggaaattttgcgctactatgagcgagcccatcctccatcagctgatatgatagggtcagcctgagactagggttcccaatgtataggtaggtaaagtcggtacgtcgggttaaggagaaaaaggtgactgaagaagtcaagcgagtgtatgcgttcggcaaggacgcgcagggcaacaacgtaactgagggcaacaccagcatgaaggcgatcctcggcggcaagggcgcgaacctcgccgagatggccaacatcgggctgcccgtgcctcccggattcaccatcacgtgccagacctgcatggagtacgccaatgcgggcaacgcgtggcccgaaggcgcgctcggcaccatccaggagtatcgcgaggatctcgaagcccgcatgggcaagaagatcggcgatgcggaggacccgctgctcgtgtccgtgcgttccggcgcccccatgtccatgccgggcatgatggacaccgtcctcaacctcggcctgaacgatcagtccatcaacgggttgatcaagcagaccgataacccgcgcttcgcctgggattcctaccgtcgcttcatccagatgttctccaacgtggtcatgaacctcgacggcgacctgttcgagaacgccatcacggctatgaagcacgctcgcggcgcggcgtccgacaccgatctcaccgccgaggacctgcaggagctcgtggccgagttcaagcagatcttcgccgagaacgtggatgcagcggcgtatccgagcctcgtcgtggacggtgccgtgcagttcccgcaggatcccagcgtgcagctgcagctggccatcgaggccgtcttcggcagctggaacaacccgcgcgccacgctgtaccgcaagcagaacaagatcgccgacgatctgggcaccgccgtcaacgtgcagtccatggtgttcggcaacaagggcaacacctctgccacgggcgtcgcgttcacgcgcaaccccgccaacggcgagaaggagttctacggcgactacctggtgaacgcccagggcgaggacgtcgtggccggcatccgcaacacctcgccgatcgccgagctcaaggacgtggacggtctggaagaggccggccgcgagctcgaagaggtgttcgtcaccctcgagaaccacttccgcgacatgtgcgacatcgagttcaccatcgagcagggcaagctgtggatgctgcagacccgcgtgggcaagcgtaccgccgccgccgcgctgcacatcgccatcgagatggagaaggagggcctcatctcgaaggaggaggccgtcatgcgcgtcgatcccgagcagctcgaccagctgttgcacccgcagttcgacaagaacgcctcctacgacgttgtcgccaagggcctgaacgcctcccccggcgccgccgtgggcgaagccgtgttctccgccgccgacgcggtggccgtggccgaggcgggccgcaagtgcgtgctcgtgcgctgggagacgaaccccgacgacctcgccggcatgatcgccgccgagggcatcctcacctcgcacggcggcaagacgtcgcacgcggccgtcatcgcccgcggcatgggcgccccgtgcgtctgcggcgtggaggcgctgcgcatcgacgccgagaagaagcaggccagcgtcgtgggcaccgacatcgtcatcaaggaaggcgacatgatctccatcgacggcaccaccggctccgtggtgctgggcgcggtcgagctcgtgctgcccgagatgacgggcgacctcgacaccatcctcgagtgggccgacgagttccgcacgctgggcgtgcgcgccaacgccgacaaccccgaggacgccgagctgtcccgcggcttcggcgccgagggcatcggactgtgccgcaccgagcacatgttcctgggcgaccgcaagcagatcatccagaccttcatcctcaacgaggatccggccgtgcgcgagaaggccgtgggcgagctcttggctgcccagacgggcgacttcctgggcatgttccgcgccatggacgggctgccggtcatcgtgcgcctgctcgacccgccgctgcacgagttcctggagagcccccgcgcgctcgacgtggagatcgccaagctcgaggccgcgggcggcgataaggcgctcatcgccgagaagcgcatgctcatggagcagatcgacggcatgagcgaggcgaacccgatgctgggcctgcgcggctgccgcctgggcatcgtgtaccccatcctgccggtcatgcaggtgcgcgccatcgccaccgcctgcgccgagctgcagaaagagggcttgaacccgaagcccgagatcatgatcccgctcgtgtccgtggtggccgagctcgagaagctgcgcaaggtcgccgaggacactatcgccgaagtcgccgccgagcagggcgtcgagcttgacatccccgtgggcacgatgatcgagctgccgcgcgctgccgtcacggccgacgaaatcggcgcggttgccgacttcttcagcttcggcacgaacgacctgacccagacgacgttcggcttcagccgcgacgacgtggaggccgagttcgtcccgcagtacctggccgagcgcctgctgccctacaaccccttcgccaccatcgatccgggcgtggcgaagctcgtggagatgggcgtcgagctgggccacaagggcaaccccgacctcgtctgcggcgtgtgcggcgagcacggcggcgatcccgattccgtgaagacgttccacacgatcggcctcgactacgtcagctgctccccgtaccgcgtgccgctggcccgtctggccgccggtcaggccgccctggccgagaagatgggcgacggccgcgacaagtagcctccgtccgagacctcgcatgatcgaagggcccgcagcatcgcgctgcgggccctttcgcgttcggcgtcgagttgcgagtgcgacgggacgcgaaaccttcagtgagagggtgcgaaaagggctccatcttgttgacggagccctttttgaaagcttggacagcttgtttcaaactgtatgctgcaaaacaggtcgcgtgatgtgccggctctgttgggagcagctagaccgtctcaaggtacttggcaacgctcttgcccgcttcgcggcccaacacgatggccatgccgaggcttacgccgggcgtgggggtgatgtattccacgccgaaacgacgaccgcaatcgttgccggaaacgtacaggccgggaatcggctcgaagttggcatcgagggcgttctgctctgcgttggtgatgattccgccgcaggtgctcatgatctcgccaagtcccggattgcccgcgagcgcgtagaacggaccatccttgacggggaagagcacttccgcgtagcgaccgaaatcctcgtcgatgccgtattcgcagaacttgttgtacttctcgatttccgcgacgaacgtctcgacagcatcgccttcgagcccgagctgcttcgccaggccctccagcgtgtcgtccgcgatgaattccggtgctgcgaacatcgctccagcctggttgtcctccttggaggattcgggctcgacccaggttcccttgaacttctgataagccttgtccatgcctgtttttagctcttcgatcgcggacgttgtcgggctgaacatgccgtgttgcggcacggtgtactggcggtactcggggaagttcgaatcgaacacgcaggagatgggctctcggggcagatacacgttcggcacgccgcgctgctcgacaacggggtagaactcgttcatgaagcgcttgccatcggagcggacccatacagcttgagggaagttgttcatagaagtgggtgcttggatgtgcttggcgttcatgccggggatgatgctctccaaatgagctcccgcccaatgagccatcttgatgccgtcgccttgatactgccaattcgaggcgtccccgacgaacctttcattgccgaaggcatctttccaagcttctccctcgatcatgttgttcttgatgtcgggcatcaggtcgttgagcatttcctcgttgtaggcgaagccgcccgtggccaccaccacggccttgcagctgaacttgaggtacgacccgtcggcccggttctcggcgatgacgccggacaccttgccattgtcctgcaggatctgcagtccccgcgtgttgaagaagaactccgctcctgcggctttcgccttttcgcggttgtatccctggatcttggtctgattacactcttccgcatatgcggatatgacgccggggtagaacttgatgggtccgatattgggcagcaggtgcggccatgtttcgcctgctgcgggggatccgctatggctcaaggtggcgatgtccgaatcggtcaggctgtcgtagtaccaatcgatgttatcgcccatgttctggcagtacctcatgatgagcccggggttgccctggttgccgatcatggtcatccaattctggtagtactcgaccgggtcgacatcatggtactggttgccttcggtgatcttgttgacaaggttcgagttgacgccacagctctcgttgcccgttgccatgtacgtttcttcgggttggaactcgagaagggcgacccggtaaccctgctcggacagctctcggcacgaggttacgcccgcgtacccatggcccaccacgaccgcatcgtaatcaccggcttcgcttgcttgcgcggagtaatcttgcggcgtccgccaagagattgcgccctccgtcgcgctgccgtcggatacgttcttctcatcggacttgtcgctgtccgtttttccgttcggcgagcacgccgccaagaaacccgctcctacggttcctacgccagcaagcgctgcgcctttgatgaaactacgcctatccatccctctctccgttcatctcaacagctaacacgaaagatgctgccggtcggtttgccttcaagccgggcagcaaggcaaagactacgcaaaccgcttctttttcggaatcgcgatattgagggaattgggaaaagagtccttgcaaagcgcctggaaagcatcgcggtttttggggaattacgcaaaacacgaggtgaaacgcttatggcgttcgccggttcgccggagcgaagctgcttgggcgacgagtctccggttttagaaatccgtcatcgaagacggctcgttctcgttttctataagctgcagaaggtcctcgcgcgagtggatgtccagctttttgtagatgctcttgatatgggagcggacggtggagtcggacaagaacatcttctttgcgacgtaggcgggggagtagccgcgccctaggaacaagagcacctctctctcgcgtttcgacaggccgcccttgtcggcaacccgattgcagcatgtttccaagtccgacagcaggttcggcttgttcgcctgctgcgaagggaggtacattgttttccacgagcgtatattgggcaccagaaccaacgagatgaagtacagggtggaaagcgcaagcaatactgcttcctcgttcccgctgatgcccgcaagatcgccgaaatgcaagccgatgatcgaaaccaagcaaaaagcggagatcgagctaccgaagatcagaggcaccgagaactcttgcgcgtgcgcgatcgcgcagaacgaggccagcgcaagcacccctatagcgccgaagaacacgtaaatgccgatcatgccgatgctgtgcaccgcatgacctgtggggaagctgctgagaaacaacaatatggcggcgaagatgggcaggtatatttggaacacgaacggcaaaagaggcttgtccgacttcctaagccataaaggcagaaccgagacgacggcgaggatcgtgccgatgctttcggcgtacatgttgccgaaaaccgcgatcttgcgtaccgccatcgtcaaggcgaacagcaaaaaacccacgaacggaccgagggcgaccgagaagaaggagtggaacacggtggaatcttggcttttcgcatcgcgttgcacgttcagcaggcgaacgaactcgccgtgcgtagagcggatcagcaggggcacgagtccgagaatgctgagcagaagaaagctcgcgaccccggtttcgggacccatgtaaacgaatcccgtattgatgagcgcgcagatggccagcaggacgctcaggcgaatgagggcttcccggaacgtgagggtggagaatacgcttccccaagcgatgcaaaggagcaaggtcgtcgttccgcagagcgttcctccgagcaaggagcacaattcgaccggaactccggggagaagaagggaagcgaagagcaggaaaagccccgtcaggtagagaagcgcgacgatcgtcattcgaagaggagttaggaatgttatccgacttggttctttcgcgcacagcgcgatgcacgcggctgccatgccggcgaccatggcgctcgccaacgtggagtggacgaaatacggcatggccaagtcgaagcctgccaagtcggggctgaatatcatgttcggggagtagagtggcaaggttgcgaaaaaggctacgaaacaaacttgttcgaatgcggatggctggctcatgtcgaatccttctcgcttgtacctatctgccaagtgcatggatcttcgcgctccggtcatgcggcaccgtctttttccggtagcgcttgggcggccgccgtttcgcccacgagccagatgcggtcatcggggaacaggcgcgtgttgcggctcggcttcatcttgagcagcttctcatgctcgtgtgcgacgacgaggcagccgaaggagcccttgaaatcgacggcgccgatggtcttgccggcgaagggcgagcccgcttccacggaaagcgacacgcatgcgagatccaacttgtcggggtgcgcggccgcgtactcgtcgaacgatgcgctgacggcatcggcctcgtcgatggagtcctccttgagcagggtttgcaggtaggcgtccacctcgttctcggtgccgaggaacgtcagcacgtcgccctcgcgtatgcccagcgggtcggccgggtcgttgatgcgccgcacaagctcctccttggtcagtcgcgcgagcgcttgcgatcccatgcgcacgccctcgcgctcgatggccatgagatccaggttgtgcgctatgccgaacaggaagtcgctcgaccgctcggcgcccaatcggcgcagcgtgcgcgacgcttcgacctccaccacgtacaggcgctcctccacccacccggcgcgttcctcctcgtcggattccgccaggcgctcggccaggatggactcgttgaggttgccgacgaagctcgtctccagcttgaggaaccacgaatgcagcgtgcgcgagcgcgcgagcaacagcgagcacgtcgccgccagaacgaacatccacaccgattggcgcgcgccggccgcatgcacgatgtaggccaccacgccgcaggacgccgcgccgcccgccagcatcaggacggccaacggcacatggtttcgacggctcttcatccacagcacgccgaactcgttctttcgtcccgtgtagaacaggttcgacaggaacagtcccgtcacgaagatgcccaccgcggcaagcaacgggttgagaacggcctccggcacgaaacccgacagcaaaggaagggccgtgttcatgagcacctccaccgatgcgatgccggccagcaccacgagccccagcttgagcgtccagcgtttgaggtagtccacccataagttcggttcgccgtcctcttcctgcgcgcgctccagatgctcatggcgcagtgcgaacaggctttcgggcaagacgcgcacgaggaggtggtagatgcgttcggaattcttcaccagaagaggcgaggcgagcgtcgtcgccaccgacacggtgacgatgacggggtagaggaagtcgggagtcacgcccgtcgccgatcctagcgcggcgatgatgaacgagaactcgccgatctgcgccaggctgagcccgctcatcaccgaggttttcagcgttgcccccgacaacagagcgcccaacccgcagaacagcgagcgtccgatgatggccaccaaggcgatgacgacgatggctcccaggttctccgtcacggccgcgggtgtgaccagcatgcccaccgatacgaagaacacggctccgaacagatccttgatgggcttgaacagcgcgtcgacgcgctttgcctgcacggtgccggccaggatggatccggcgaggaacgcgcccagcgccgaagagaacccgatggcgtcggccagaaccaccatccccaagcacagcgcgatggacgcgatgagcaggatctcgtcgttgagctcggaacgcaggcgcttgagggcgctcggcacgaggatgacgctgagcgcgaaccataccacgaggtacagcgccatgcgtccgatacgcacggccaccgcaccgccgtccaccgacgcgctgaccgccaccgtggacagcaccacgagcaggaacacgcctgcgatgtcctcgatgaccagcacgccgaacacgagctgggcgaaggccttggtgcgcaggcccagctcgccgaacgtcttcacgatgatgctggacgacgagatggccagcatgccgccgaggaacaggctggttgacggcgaccagccaagcagcgtgccgcaggcgaaccctgccgctatcatgagcgacatctccacgacggccgtgacgagcgccggacggcccacggtggtcagcttcaccacgctgaactgcagtcccaggccgaacatgaggaagatgacgccgatctgcgaccaggtggacacgtcggccgtctccacgatgttggggatccagccgatagcggggctcacgaggaatccggccaccacgtaccccagcacgagcggctgtttgaaacgccggcagacgatggtggccaccgccgccacggcgagcagcaaggcgaggtcgttgacgagctggggtatggactgcataggttcctcttcgcgcactgtacggtcgaaacctcattgtagcaagccgagacgcgtcggcggacgaaaaagaagcggcccttgcgggccgcttcccaaacatggatcggtttctggtttcttacgattccgccagctccgcgggggtggcgcggcgcgccatggccttgtcgtagtctttcgtgccggcgaacacctcgttcatgtacgggttcaccttgagcttcttggcgcggtacatgatgtaggcgaacgcggcgatgttggccagaagcgcgatgacggacacggccaggttcacgttcgggttgttcaccgactgcacgctgaacacgctgtagtcctggaacgccggcacgcactgggcgaacatgcaccagatggccagtgtgaacgcgcggttctggatccagccgcctttgttccagaagaacgccgccacggtgggggccagcagcagggccaggccgcagtaccaggagtgcgtgggcaggcagttgtaggtgtagcagaagttccacaggtcgtaggcgatgatgaacacccaggtcatgtccggccacagcatgtcctggcgcttcttggaaatgtagatgccgaaccagccggtcatgcaggcgatgttgatgatgcccgccacgccgttgaacacgttgtgccaaccgccgtacagcgtgacgccctcggaggacacccaggtggtgccccaggcgcggatggcgctctcgaagtcgctgaccacggcgatgaggatgttgatggccacgatgacgaacgggaagcacttgaaccagtgcgccttgccgatagcgccccacgagtacttgatggccatgaagccgatgcacccgatggtggccgcgtagagcttcgcgtagtggaaccagctgttcatgtgcacgtgcgtggggttgtcgagcgcccactgctggccgatgccggcgccgatggaaatggcgacgaagtacgccgtcaacgcgacgggcagcacgatgaagcagaacacgccgcccgccttcgtgcggcgcgccacttcgttgatgaggatcaacccgatgaacacgatggcccagccgagccattggtacagggcgttctccccgtagacttggaacaacatgacaccctccttcttcagggtacgcttcgcacaggccgccttccggcctgctgtttcttcagatgagattatcgataccgttgcatgcgggttcgcctgcgcaggttctatccgctttcgggtgcgccgttcgcgccgcggtccatgtgcagcgtttgggcgatgagatccttcagcacctcgtcgtcgacgtccggatgcgttcgcaggtagccgacgatgcccaagatgagcacgtagaacgtctcgtagacgtgctcgatgcgtatctcgtgcagcgcgccgtagtcgcgcaccgtggtgtccacgatgtacgtggccacgcggtcggccacgcggttcacgaagtcgatgtaaagcgccgcgttctcgtgcgaggccagcgagcggcggaacgcgtcgtgctcgaacacgccgaggcgcatgagctttacgacgctggaaagggcgctttcgatgtcgcccgggtgccgttgcgcgttccagtaatgagtggcctcgatgaagtcggccacgtagtcgtcgaggacggccgaggtgacggcctccttgtcagggaagtaatggtagaacagcgagcgcgccacgcccatgcggttggtgatgtcctgcacggaggttttcgagagcccctgctcctcgtacagctcgcgggccgcggccacgatgtcggctcgacgctcggccgatgccgcgttgcgcgccttctcgttcgaggttgccatgccgccctccttgccccgttcgcttgaacgatcctgcggttcgccgccatggcggcgtgtttcgttcgatcccctgatgagcgcagcatacgcccctggttgacggagcgtcaatagacagtttcagggattcgtcaacgaagagggggacgtaagcggcgaagcgcgcgcgtccgcgacggcaatgacgaaacgcgcgaagccgtcaaccgcggcttcctctttgcctgcgaggatgctagcatgcaggtcattaagttcatttgtgaaacgaaaaaagaacgcagatgaactaatgagggagcaagcggacgcagggccgcatctcggccgaggcggcgtcgggcgatccgatgccgagggcatcgcggagcagcggacgcgaaaccgagaaggaggggtcatggaggagagcaagccgagcggaaagcggagagggaggcgctggcctatcgtggtcggcgtgatcgcggcggtcgtcgtggcggcgggcgcgggtttctgggtttggcacgagcagccgagcttctgcaacgccgtttgccacgatccgatggacgtctacgtggacggctacttcaacgacgcgacgcttatggcgaacgcccacgagcgcgccgacgttacgtgtttgaagtgccacgaggcgaagttgtccgatcaggtcgccgaagggctgtcgtgggtgcgcggcgatttcgccactgacgagacggggcatctgactacccatggcgtgacggccgataagaagatgtgcgcatcggccggctgccatgattgggaagacgtgaaggccgccaccgaggattggggaggcgaggcgggggtgaacccgcatgcgtcgcatcagggcgaggccatcgattgcagcaactgccacggcgcgcatggatcgtcgtatatgtactgcaacgcgtgtcacgactacgcggttcccgacggttgggaaagcccccggtagggcgtgcgaaaaggaggagcgatgatgaagaggacggcagcggccgtatgcggggccgcggtgctggcggcgggcatgacgggctgcggcgcgggattcgaaggctcggggtcgaaggacgcggccagcgccgagcagctggccatgcgcctggacgatccgtgggctcaggaggttcaggccgatcagggcgcgaaggccgaaggcgagctcgccgacggcgtgtacacgggcacgggcaaagggatggagggcctcgtgaccgtcaagctgctcgtgcaggacaaccgcatctcgtgtttggaaaccgcgcaggagggcgagagccagagccgcggaggctacgaggccatccgcgacggcaggttcgccgccatgatcgaggccgcgcaaggcgccggcatcgacgcgatcagcggcgccaccatcaccacggcgggcgtcaggcaggcggtggaggacgcgctctcgcaggcagaagccgccgccgcgaagcaggaacaggggggattccgatgacgaagcaggttcacgggcagacgggcgcgcatgcgccgctgtctcgccgcgatttcttgacgagggcgggcttgacggtgggagccgccgcggccgcggcggcggtgccgggcgcggcctatgcggtgcaggagggcgtgatcggcgactgggcggctgatgggtcgaaggccgtcgacgtgcccgacagcgccgtcaccaacgcctcttggtcggacggcacgtatcgcgagcacaacggcgcggcgttcccggcggacgatgcaagccctatccctccgcgcgcggtgcccgcgacatgggattgcgagtgcgacatctgtgtggtgggcgcgggcggcggcggcttgaacgcggcggcgcgcgcggccgagcagggcgcgcggaccatctgcgtcgaggctatgggcctgcacggcggcaacgcccaggaggcgggcatgtgcgccatcctcggcggatcgaagctgcaggagtcgaagcgtttcgcgttcccgtcctaccccttcgacgcgcgcaagctggccgattgggccatcgacgagtaccattacgcgtgcgacccgctgctcatccaccgcatcgccgaggcgggcggcacgtgcatcgactggatggccgactgcggcgtccggtggcgcttgggcgaggtgccggtgtacgtggcgccgaagaactcgacgctcgaccaccatgtgctcaagatgaaggacgccaccgacgccatgttcagctttggtcagaagcacggcgtgcagtacctcttccaaagcccggcggaggcgctcgtgcaggacggcgacgggaggatcgtgggcgtggtggtgcgcgaggattacggcgcagagaagtacatccacgccgaacgcgccgtcatcctcacggcgggcggcttctgcaacaacaaagccctgttggagcgctacatccccacggcggccatgggctgcgcctcgagctacctcacggcgggcgagacgggcgagtgcttccgcatgggcttgggcgtgaacgccgacgtgtcgggcttcaacagctcggccagcttcgacggcggcgtcgattgggaggccgagggcggccagtgggcgcgcttcctctacgacggcatgacgcagctgtcgcgccagccgtggttcaccgtcgaccgctgcggcaaccgtcttcgctacatggacagccgcgtgggcgaggacggcgcgaacgccatctacgcgctgggcgatctggccaccatccagatgacgccgccggggcaccgctcctacatcgtcttcgacgcgcactacgaggatcatctggccggcttcgcgcaggagcattgccgcaagctgatcacgcccgacctcgagcagatcgacaaggtgcccgagcattatcgcgactggcaccacggcgtgcaggacgccatcgacgccgacgtgctgaagaagcgcgactcgctggaggagctggagcgcgacctggggttcgcccccggcgtgctggtagaggccgtggagaagtggaacgcgtgctgcgagcgcggcgaggacgacttcatgtatcccatgcctcccgagtggctgcacgccatcaaggacccgccgttctacggctgccgcatcggcggaaacctgtacggcacgaaggcaggcctcatgatcaacgacgagatgcaggtgatctcgaccaagggcaccgtgatccccggcctgtacgcgggctggcacacggccggcggcgcgtgcggcgagaacagctacatcggcgaccctatcctgggttcgctgttgggcgacgtgagcctggcgttctgcggcgggtacttgtgcggcacgtacgccgtcgccaacgagatgaagggaggggagtagcatgaaagagcagttgaaggacatggcgcggccgtatgcgatgctgttcctgatcgcgctcgcggtggcgatcgtggggcgcatcgggctggccgtgatggacttgaccggaacgctttcctacgactacatctcggcggccgacgtgcccatcctcgacgtcgtgtgctccatcctgaccgggtcggcgctcgtggcgttcatgtacgcagcatcgctggcgatggtcgtgtccacggcgggcgtcgcgctgcacggtctgctgttcgcgcgccgcagcgagggcgcgggcaggccggcgactgcgtttctgtggggctgggcgacggcgcttgcggccatcgtgtgcctgctgatcacggcgagcgggatactctcggccgtgcaggtggcgtccatgagctcgaagctgccctccctgccgatgctcgtgctggcgctcgtggggttcgcggcgtttctcggcacgcttctgggcgcagcgtccatgacggtgtgcgcttgcctcgcgcgggcgcgcgacgagaagcgcgcaggctggaacctggtgctcgcggctttcgtctgcggtctcgtggtcatggttctcaccgtgggcacgttctcggccgtcaatgcagcgtcgatcaacctggcggccgtgggcgcgtggttcgccgccgacgtggtcgtgaacctggccatcatgttcgggatgggcgcgctggtgaagaagggtcgcgcgtagcatggaatcccggtcgcgcttctcctttcggacagggggaagcgcggccttcttttagggaatatcccagtgtccggcgcgtgggcttccgacgcgccggacgcgcccgctttccttgagcgaagctatggcgcgctccgtcgtgcgtcttgccaggccgacggcttccgcgatctcggagaccgtgatcgaagggttctcggccatgaggctcaggatgctattcctcagcccgtcctctcgacgctcttccgtgcagaaaggctccatcgcatcgcggatggccgagagcatgaaggctacgaaggcggtcgaggatccggtcgcgttcgattcgttcaatgcggcgtagtacgcgtcttggcgctcccggatcatgctttcgatcggcagccaggcgagcacggagcgccatcgagccagcagcagcgtgtgccagagccttccgatgcggccgtttccgtcggagaacgggtggatgaattcgaactcgtaatggaatacgcacgaagcgagaagcgggtggagcttcgtcgaacccagccattcgaacaggtcggccataacttcgggaacgtaggatgcgggggttccggcatggatcaatcgatccccgtcgtatactcctgcgtttttcgtccggaaggttcccgcgtccttgcgcaggccttccatcatgacgccgtgggcctcgaggaggtcgtccatgttgcgcggatcccagttgccgagcaagtcgtatgctcgtttggcattccggacctcccggatatcgtcgggcggaccgaagacgcgccggccgtcgatgatatcggtcacctgctccattgtgagcgtgttctgctcgatagccagagaagagtgtatggttttgatacgcagctcgcgatggaggacgggcgaggaggacagcgcggagtcgggtgcgagccgtcccaccatctcggcgatatccaaggcggttgcagtaatcttgtcggtggggtcgaagggcggttcgtacaccagaggcctcctctcgaatatttttaccgccagtattttaccgccaatggcggtaaaaagaaagtgcgagcgtcttgctcgtcttttttccggtgcggagaaggtttttgcatgcggaagtctggcatcggcgatccatgcgcagacggcgtgcgcgtcagtcgatgggctggaggaggccgagggcggctttgcgctcggcctcctcgcgcgcttggacgtcggcgatgacgatgcgccaggtgcgggcgagcgcgcggcgctgccggtcgtcgagcctgctccacaggtgcttgcgcgcgagcaggtcgatggtgcgcgcgatgaccctccgctgccgctcgccctggggcgtggcggcggcgaacacggcctttcggtcgcgggggctggccaggcgctccacccatcctctctcggccaggccgtccaccgcccgtgcgacgccgacggccgtcatctgcagctgcgacgccaggtcgccgatgcgcagcggctcgcccacctcgccgaggcgctgcagcacgcggcattcgctgagagacgcgccgcacgaggccttgagggcgctttccatcgcgcgcttcaccagttccagcgacacgagcgcccgcgaagcggcgtagcggccggccgtctcgccgggcggcggcgcctcgatgctcgcgccggctgcgatggaggcttcgaggatggtgcggtgggcagcgtcttcggtggggaacagggcgtagaggcgctcgacgagcgcgtcgttggcctgcgccacatggcttgctccggcgtcggtgatgcccacggtgcgcacgcgcctatcgccgtcgccggcgcgtcggcgcgtcgcgtacccggcggctgcgagcgcgttcacggcctgcgtcaccacgttcggtttgaggtcgagcatctttccgaggctggactggtcgatgccgtccgggcctgcggacagcagcttcaccagcacgcggtactgcgtcacgctgaggctgctggcctgcgccagcccgcttttgagcgcgcgatgggtgaggtcgaacgcgacgaagaacgtcgagtcgagagaaaggtcgcgctcggtttcgatcccgcccatgctcaaccccctccttttttcgcgcgctctgcagttcgttcatcggtgaaacgatattgtagcgcgagcatgagcggttcggggaaaacccatcagagcgccacttcgccgtcgccgaaggcaaagcagcgacgagggacgaacgcgcatgcgtccgagcagcaagcctttccttcgcatgcacgtttttgtcaagcatgtacgggcattccgacccgttttccttgtcaaaagcgtgcatgtaggcaatacgccgttcgtgcacggcggcgctctcgcgcgcgaggatgcccttttccggcgactgcgcgcttagcggcgcgcgcgccagcgtccgatggccttcgcgatttcggtctgcacgacggacagcagggcgaagcccaccacgagcgcccactgaccgaggtccatcgtcgtgccgccgaacgcgtcgatgaagggcggcaccagcagcacgaccagcatgagcgcgatgctggccgccgcggcgagccccagctggcggttgcgggcgccctcgcggtcccagacggggtcggtggcggagcgctggttcagggagcgcagcacctgggagaatcccagcacgccgaacgccatcgtgcagcccagctcgtagctgcccgcgttctggccgatcacgaaggcgaccagcgcgagcgccgcgatgaacacgccctgaaagataacgcggcgcgctagcgggccgtccagcaggttgttcacgcgcatgggcggatgctccatgatgtggcggctggcgggctccacgcccagcgcgagcgcgggcagcgaggcggttgccaggttcacccacaggatcatgacggcggtgagcggcgcgttccagttcaaggccacggcggtgagcagcaccacgatctgagccacgttgtcggccacgaggaaggagaccaccttctggatgttgcggaacacccggcggccctcgcgcacggcgtagacgatggtggtgaagcggtcgtccatgaggatcatgtcggaggcgtccttcgccacgtcggtgcccgtgatgcccatggccacgccgatgtcggcggctttgagcgcgggcgcgtcgttcacgccgtcgcccgtcatggcgcacacctcgccggcatgctgcagcgcgcgcacgatgcgcagcttgtgcaggggcgacacgcgggcgaacaccgaggtgttgcgggccgcctcgtcgagcgccgcgtcgtccatctcgtcgagctcggcgcctgtgaccacgaggtcgccggggcggaagatgtccagctcgcggccgatggcgcgcgcggtggaggcgtggtcgcccgtgatcatgacggtgcgcacgccggcggtgcggcaggtttccacggcctggcgcacgtcgggccgcggcgggtccatcatgccgacgaggccgatgagcacgagatcgcgttcgatgtcctcgacgtcgccgggcacgccgggcagggcgcgggtggcgaatgccagcacgcgcagcgcctcgtccgagagccgttgcgccacggccagcgcgcgggcgcgatcctcgtcggtcatcggccgcgggccgttctcgtccatgatgaaggcgcagcggggcagcagcgaatcgatcgcgcccttcacggcggccacgatctcgccgtcgcgctcgtgcacggtggacatgcgcttgcggtcggagtcgaaggggcgctcggccaggcgcgggtaggtcgagcgcagcgcggtcgggtcgatgccgttgtcgcgcgccagcaccagcagcgcgccctcggtggggtcgccgatgaacgcctgcgcccccgacgcgccctcctcggcgggcgcgaacgcggcgtcgttgcacagcacggcggcgaatgcgaggtagccgaacaggtcggggtgctcctcgagcgcttcggcgggctcgagcgcctcgtcgcggtcgaggtcggggcccagcgacacgcgcacgacgctcatgcggttctcggtgagggtgcccgtcttgtccgtgcagatgacggtggcgccgcccagcgtctcgacggccggcaggcggcgcacgagcgcctcgtggcgggccatgcgctgcacgcccagcgccatggtgatggtggcggtggcgggcaggctctcggggatcaccgagatggccagcgacacggccagcagcagcaagggagcgaacgggcggccgtaggccaggccgacggcaagcacggccagcgccgccgctacgcccacgatggtgaggatcttgccgaacgaggccagcttgcgcttgatgggcgtgtccagctcctcgtcgccttccagcatgccggcgatgtgcccgacctcggttcccatgcccgtggccaccacgatgcccgccccgcgtcccgcggcgacgatggcggtggcgaacgccatgttcgaccggtctcccagcggcgcgccgggcagaaccacggcggaggcgtccttctcgacgggcaccgactcgcccgtgagcgcggcttcctgcatgcgcagcccggccgcctcgacgagtcgcaggtcggcgggcgccatgctgccgtcgcccagctgcacgaggtcgcccggcacgaggtcgcgcgcgggcaccaccatctccatgccgtcgcggacgacgcgcgcctcgggcgcgctcatcgatcttagcgcttcgagcgaggactgcgccttgcgctcctgcacgatgccgatgaccgcgttcaccaccacgatggcgaagatgatgccggcttcggcccattcctgcagaagcgccgacagcacggccgccacgaggaggatgaggatcatggggtcggtcagctgctcgcgcgccatctgcgccagcgtgcgcggcggcttcgcgttcagctcgttggggcccgtctcggcgaggcggcgcgcggcctcgagctcgctcagcccttcgagcgaggagtcgagctcgaggaggacgtcggaaaggggctccgcctgccagggtcgggatgcgggcggtttgacgggtgcttgagtgttcggcatggagcttcctttgcgcggtcgttgcgacggtgttcgcttccacgatacccgtccgcggctcgcgtcgatcgaaccgtcacgagccggttgccgatcggacggtcgatcgttcggagggcattccccgtcccgtcggtcggcgcggcgcgacgtcctctcgccgcgctcgggcgctttccgttagaatggtggtctccgaaggaaaggaagccccgtgaccgcgaacctccgactcgaccgtctcccgcgcaccgtggagctggcgcgcgccgccgacggcgccgcgacgctcgcctacgtcgaccagcgcctgttgcccggcaagctcgcgatcgagcgaaccgcggattggggggcggtggtggacgcgatcaagacgctcgcggtgcgcggcgcgcccgccatcggcgtggcgggcgccgctgccgtggcgctttgggctcgggaggccgccggcggcgacacgggcgcgggcgaggtttccgcataccgcgccgcgctcgagcggacggccgaggagatcgcctgcgcgcgcccgaccgcggtgaacctgcgctgggcggtcgagcgcgtgctgggccgcgcgcgtgttgcgctcgacgggggcgcggctcctgcggccgtggccgacgccctgttcgcggaggcgaagcgcatggaggccgaggacgaagccgcgaaccgcgccatcggcgcgcacggagccgcgctgctgcggcagggcagccgcgtgctcacgcactgcaacgccggaagcctggcgacggcgttctacggcacggcgctcggcgtggtatacgccgcggccgagcagggcaagatcgagcgcgtgtacgccgacgagacgcgcccggtggggcagggcgcgcgcctcacgtcgtgggagctggcgcgcgcgggcgttccctgcacgctcgtctgcgacaacatggccgcaagcctcatggctaaaggagaggtggacgccgtgatcgtgggagccgaccgcatcgccgccaacggagacgcggcgaacaagatcggcacgtacggcgtggccgtgctcgcccgccatcacggcatcccgttctacgtggccgcgcccatctccaccatcgaccctgcgatcgcggacggctcgggcatccccatcgaagagcgcgatgcctccgaggtcctgcccgtcgcgatcgagggcgtcgacgtgtggaacccggccttcgacgtgacgccggccggcctcatcacgcgcatcgtcacggagcgcggcgcgttcgagccggataagttggtatactgatcctgcaggtcgccgacggacgggcgacggaaaaggagggccttatgcgcatcatccatcgcgaggaccaagagcagcgcgagcacgtggagctttcctgcgacgcggcgttcgccgacgagagcgacggccgcgaccgatccgccgagcccgacatcctgcgcaccgactaccagcgcgaccgcgataagatcctccacacgaagtccttccgccgcctgtcgcacaagacacaggtgttcctggccgccgagggcgaccacttccgcacccgtctcacgcacacgctggaggtggcgcagatcgcccgcaccatcgcccgcgcgctggggctgaacgaggatctcgccgaggccatctcgctcggccacgacctggggcacacgcccttcgggcatacgggggaggaggcgctcgcgcgctgcctggcgcgccacaaggggatcgacccggcatcgcccgaggcggaggcgctctaccgccacaacgagcagagcctgcgcgtggtcgagcgcatcgagaacggcggcaagggactgaatctcacgtccgaggtgcgcgacggcatcctcaaccacaccggcgacctgcgcgccgagacgctggaggggcgcatcgtgggcacggccgaccgcatcgcgtacgtcaaccacgacatcgacgacgccatccgcgcgggcatcctgcgcgaggtcgacctgccggcgtcgacgcacgccatgctgggccccgaccattcgtcgcgcatcgagacgctcgtgctcgacatggtggagacgtcggccgccgtcgacgacatccgcatgagcgacgcggtgtggaacgccatgatggagctgcggtcgttcctgttcgagcgcgtgtacagcgcccctgccgtcaccgacgaggtggcgaaggcgacgcacctcgtggacgacctgttcgactactacgtggcgcacacgggcgaagttccgcaggagtaccgcgccatctccgagggcgacgacctgcgcgccgtcaccgacttcatcgccggcatgaccgaccgctacgccaagaacctctaccaaaggctgttcatccccaacgcgctgcattactaggttccctcggcctaaggacatttcttcgttgcgcgggtgcacaagaattgtataatcgtctaactatgctttccggggatcacatcaggcaatcgttttcggcggcgctgcccatcatgctgggctacgtcgccatcggcataccctgcggcatcctgagcgcttccatcggcatgaacgagctgcaggtgttcctgctgtcggccgtgttctactcgggcgcgggccagttcatgatcccgaacatgtggctggccggctcgccgctcgcgtccatcatcgccagcgtgtcgctggtgaacacacgccagatgctgtactcggcctcgttcgcgccgcgctgcgagcgtgtgaagaaacgcctcgcgtttctgttcgcggctacggtgaccgacgaaagctacggtgtgaacacggcgaagttcgaggagggcggctggtcggttggccgcgccacgctcgtgaaccttttctcgcaaagctcgtgggcgctgtcgaacgtggccggcgtgctcgtgggcaacgccgtgggcatcccgctggccatagcctccttcgccatgacgtccatcttcatctgcctgctcgtcacgcagaaggtgacgccggccaacgtggtggctgcggcgttcgccatcctgggcgtgtacacatgcaagaccatcgggctttcgggccccgccatactcgtgggcgcgctcgtgggcgtgatggcggcgctgctgttcacgtgggcgaaggagcgcggctgatggaaccgatgggctggggcgattacttcatcgtgctggggtgctgcgcaatcaccatgctggtctgccgcgtggtgccgctgttcgttctcaagggcaaggaactgccggaaggggtcgggcaggcgctcggcttcattccgccggccgcgttcgccgcgctcgtcgcgaacgaccttttgacgcccggcatgttcgacgcaggcctgtggccggcagccgcgcccctggtcgccgcgcttgcggtggcgctcgtcgcctggaagacgaaatcgcttctgtggtgcgccgtctcgggtgtggccgcgtacgcgctgctcatgctcctgtagaggccgtgcgcatcggaagaccgggccggaagcgcggcggaattcggcattatgcgtggagagcccaagtttttgcgcatgtgcccaggtttttccttgcagtaccgttccgttgacggtatactatccaatcgtgtctttactagacgacatgcaattaggtttcattgaatatataagaaggaacgggtcatggatatcattcgcgccatcgaacagcagcagatcaagcaggacgtccccgagttcaacgtcggcgacaacgtgaaggttcactaccgcatcaccgagggcaaccgcgagcgtatccaggtgttccagggcgatgtcatccgtcgccagggcgcttcgaatcgcgagacgttcaccgttcgcaagatcagcttctccatcggcgtggagcgcaccttccccgtgcactccccgaagatcgagcgcatcgaggtcgtgcgtcagggcgatgtgcgccgcgccaagctgtactacctgcgcaagaaggtgggcaaggccgcgaagatcaaggagaaggcgtaccgctaggccttctatacgcttcagatttgcaggaacccccgccgtccttccggacggcgggggttcttttttgcagggacgggcgaggccgcgcagcgcctttctggtatcatggtcggtcgaagaagagcatgtcgagggggattcatgggaccgaccgtcgccgatatcaagcaacgcctgcacgaagccgacgagcgcgagttcgcggtgctcgagcgctcgctcgtggccgacgcgcgcaagggcgtgcgcgacgccgtggagcgggctcgggcgcgtctggcggccgaggcggcggaacggcagcgtctggcgtcgctgtacgcgttcgagcgcgcgctggccgcagagcgcggcgacggcgtgatcgtagggctcgacgaggtggggcgcgggccgctcgccgggcctttggccgtgggcgcggtggtgctgccctccgagccgttcattgagggcctcaacgactccaagcaggtgaagcccgaggcgcgcgagcgcatcgccgtgcaggtgaaggccgtggccgtggcttggacggtcgagtacgtggaggcgtccgacatcgacgcttgcggtatgacggcctcgctcgcgctggcgttccgacgcgcgatcagacgcatcgaggaagcgggcgtgcgccccgacgtggtgttgctcgacggcaacccgatgcgcctcgacgagcgcgaggtgaacgtggtgaagggcgacgggaagtgcgcctcgatcgccgccgcctccatcgtggcgaaggtagagcgcgatgcgctcatgtgccgctacgccgaggagtaccccgaatacggcttcgacgcctgcaagggctacgcgagcgcggcccatatcgaggccatcaagcgctacggtctcacgcccatccatcgcgcgacgttctgcacggccttcacgcaacctgccctgttctagcgcctccgcgtccttccacacgtttccaccgctgcgttttccacgcttgcgagccgttcggcgcgccttcgggtgcaagctggacggcttttccatctgcggcttctattcggtgcggaatctgcgtcgaaagcgcatggacgatacgttcgatccgcgttggaaacggaggcaaggcgcgtgtcatccgcatggaaacggcgtgtctttccgggaaggtttcgcggtgcgtttcgctggatacgtgccatcgccgcgtaagacggcatccttatcatggaaccacagacgaaaggggcgtggtgtcatgtatcaggatacggcggcaacgatcgaatggcaggacggcgagcaggcgacgtgcggaaagaaggccggcgcgggcgagcggcgaggagtaggctcgggggccaagcggcgtgcgaaacggggcgaacgggcgcaggatcgcgagaagacggcgggggagcgcaacgcggagctggggcgtagaggcgaggacgccgccgctcgctttctcgaccggcgcggctacgagatcgtcgagcgcaactggacgtgcgcggcgggtgaggccgacatcatcgcgcgcgacggcgacagcgtcgtgttcgtggaggtgaagaccaggtcgagctgcgactgcggcatgccggcggaagcggtggacgaggccaagcgcgaccgctacgagcgcatcgcggcgctgttcctgcaaggcttcgacgtggtggacgtgccggtgcgcttcgacatcgtgtccatcgtggcgatctcgcccgaccgcgcgatgatccgccaccacatcaacgcgttctcgggccgatgagcgtgcgggggcagtgcgtcgtgcggtccgcgacgctgcgcggcgtggaagccgttccggtcgacgtcgaggtggtcatggcgaacgggattcccggcttctccatcgtcggcttggccgacgcctccgtgcaggaatcgcgcgagcgggtgaaggcggcgctgcgctcgtgcggcttctcgctgccggccagcaaggtggtggtgaacctggcaccgggcgtcttgcgcaagacggggtcggggttcgacctgcccatcgcggcgggcatcctgtgcgcttcggggcagttagacccgcgtgcggtgcgcggccagctgttcgtgggcgagctgtcgctcgagggggcggtgcgcccggtggccgggctgctggcttacgcgctgtgcgcgcaacggttgggcgtcgacctcgtatgcgcgccggtcgaccagggtttcgtcgcgctcgacgggttggtgcgccgtgcggcgaagtcgctggcggggttcaggacgggcccgttcccggccgtggccgacgcggcgaagccgagcagtgcgcccgcgcttgacttccgggacatcgccggccacgacatggcgaagcgcgccttgcagatcgcggcggcgggcggccacggcgtgctgatgacgggaccgcccggttcgggcaagaccatgctcgcgtcgaggctgccgtccatcctgccgccgctgtcggaggccgaggccatcgagacggcggtggtgcactcggtcgccggcgaggaggtggaaccgatcctgggcggggtgcggccgtttcgcagcccgcaccactcggccacgttggcggggctggtcggcggcggctcacccttgcgtcccggcgagatatcgctcgcgaacaacggcgtgctgttcctcgacgagctcgccgagttcagcccgtctgttcttcagggcatccgccagccgctggagtcggggcgggtcaccctcacgcgcgccgacggcaacgtcgacttcccggcgcggttcatgctggtggcggccaccaacccgtgcccctgtggctactacggcgacgaggaggagccgtgcacgtgcacgcaccggcagatgcagctctaccgcaaccgcatcggcggacccatcatggaccgcatcgacgtgcatatcgcggtgcgcaggatcccgcccggcgaggtgctggccaccgggcacggcacgagctccgaggagctgcgccgcgatgtgctgcgcgcgcgggagttcgcgtcgtggcggcgcgcgcgaaacggggaggacgacaaggcgctcacgtcggaggcgcttgttcgggcctgcgcgctgacgacgcaggacgagggcttcctcgagggcgcggcgaaggcggggcgcctgagcggccgcgccatcatgcgcacgctcgcgctcgcgcgcacgatagccgacatggaggagagcgcccgcgtggagcgcagccatctgtgcgaggccatcggcttccgcctgcgcgagggggaatcgtgagcgcgctcgctggcgagcgcacggtgctcgcgcgcggcggagaaggcttcccttctgcgctggaaagcgtggcgcagccgccggatcggctgtacgtggtaggcgatcctttcgcgctccaggagggcatcgccatcgtgggcgcgcgcagggccacgccgtacgggcgcgggtgcgccaagcgcttcgcggccttggccgcccggcgcggcatcgtagtggtgtcgggcggggcgcgcggctgcgacgcggcggcgcatgcggccgcgctggaggagggcgggcgcacggtggcgtttctgggcggcgggtgcgaccggctgtaccccgccgagcacgaggggctgttccagcgcatcgtcgacgagggcggggcggtggtctccgagcacgcgtgggacgaggaccccaagccgtaccgtttccgcctgcgcaaccgcctcatcgccgggctcgcccgcgccacgctcatcgtggaggcgggactgccgtcgggaaccttctccacggccgacgaggcgctggcggcgaaccgcgacgtgcttgtggtgcccggcgccataacggccgtgtcctcgcgcggcgcgaaccgcctcatctaccagggcgcgacgcccgtcatcgatgacgagacgttcgaggatgcgctgttctcgctgttcggatgcctgaagcaggagaccgtcccttccgtcgagcgcaccggtgcgccgcgtgcggacgagccgtcgaacccggtggcggacgcgctgcgcgccgagccgctgagcatggagcagctctacgcgatcgccgcctcatcgtgcggcggggaggatgcgcgatcctggctcatggagcgcctcgtcgaagccgagctcgccggcaccgtcgcccgccaccccgacggccgctggggtccggcggtgagatgagagaggaggagcgcgatgacgacgttatccatgttctacggcatcgtgatcattatgtataatgaggcggacggcaggcaccatacgcctcatatccatgcttggttcgcggaattcgaatgctctatcgatttcgaaggcagggttttcgacggccgtttccctcctcgaaagctcgcgttgctccgagcatggatcgtgcttcatcaagaggagctggaggccgattggaagctcatgagcgaggggcttgccgcatttcggatcgatcctttgcgataggcggtggtagcatgtggtatccggtgctcgatgaagagcgcgggatggtgatgaacaaaagccaacccgatctggttgaggtcgttgccgaaggaggctgccttctgctgctggagtttgaaacgggcgagcttcgccggctcgacgtctcgtcgttcctcaaacgcggaggcgcgtatgaacggctgcgggacgacgagtatttgaagctcgttcggatcatcgacggcgggatggcgcttggatggccggacggccaggaagtgtatccggaggccctgttcgcgatgagcgagcgcgttcggtaagaaacgcgcgtagtttcgagggtttccggatgcgctggagcctgtgttttgctatcctagtcggcatgtctcaatcagtaaccatagtaggggccgggctcgctgggagcgaggcggccttgcagctcgccgatcgtggcgtgcgggtccgtttggtcgaaatgcgcccgaagacgcccacgctcgttcatgtcacgggatgctgcgccgaactcgtgtgctcgaactccctgaaaagcgagaagcccgacagcgcggccggcatgctgaagcgcgagttggccgagctgggatcgcagctgtacgcccaggccaagctgcatgccgtgcccgcaggcggtgcgctggccgtcgaccggacggcgttcgccgaggcggtgaccgcgctcgtggaggcgcatccgctcatcgatctcgtgcacgaggaggtcgtcgacctcgttcaagccgccgagggcgccgatgcgctcgtggtggccgcagggccgctcgcgtccgacgcgctggccgcgtcgctttcccggctcgccggcgaagagcacctggccttctacgacgccgccgcccctatcgtcatggccgattcgctcgactacgcgaagctgttccgccagagccgctacgaggacgccgccgccgatgcgggcgactacctgaacgcgccgttctcgcgcgaggagtacgacgcctttgtcgacgagctcgtgggcgccgagcgcgtgatccgccgcgacttcgagacgcgcgacttgttccaggcgtgccagccgatcgaggagatcgcccgcaagggacacgacgcgcctcgcttcggcacgctcaagccggtggggctcaccgacccgcgcacggggcatcgcccatgggccgcgctgcagctgcgtgccgaggacgcgcacggttccagctacaacctcgtggggttccagacgaacctcaccttccctgagcagcgccgcgtgttccgcctcatccccgggctcgagaacgccgagttcgcgcgctacggcgtgatgcaccgcaacacgttcgtggacgcgccgcgcctgctggacgaaagcctgcgcttgcgctcgcctgaggcggagcgcctcggggttccggtgcaccttgccggtcagatcgcgggcaccgaagggtactgcgaggctatccgctcggggctccacgtcgccttcgccgtggccgctgagcttcgcggcgcgcaggcgcccgcgctcccgcgcgagacggcgttcggcgcgcttctggcttacgccaccgatcccgccgtcaaggactaccaacccatgcacgtgaacttcggcatcctgcccccgttcgagcagcgcatccgcaacaagcgcgaccgctacgccgcctacgccgagcgcggcgccgaggcgctcgcggcatacaaggccgagctggccgcgcgcggcctcgcgcccgacgcgggcggctggccggaggcatcctcatgactgcagacggtgcctcgtcgtccctgcgcgtcgaccctctcgactgcgatccgcgcatcgtcgagctgatcgacgcgttttgccacgccatgcgcgtggagcgcaacgcctcggtgcacacgttgcgcgcctaccgcatcgatcttatggacttcgcgcgttgggcgtgccgcgagcgcatcgacatcctcgctgccacgcatcgccagttgcgccgttacctgggcgagctcgaccgcgcacagtactcgcgcaccacggtgaaccgccgcctgtcggcgctgcgcagcttcttccgctggctcaacgtcaccggcatcgccgacgaggaccccgcgagcattctgcaggggcccaaacagccgaagagcctgccgcacgtcatccgggcgtcggacatggtgaagctgctgacggtgtacggcaagcgcgacgcggccgggcgcgagcgcgagcagtcgtccgtggatgcgcggaacctcgctctgctggaattcctgtacgcatgcggcgcccgcgtgtccgaggcgtccggtctgcttgcggccaacgtggatttcggaagcgggcaggtgaaggtgttcggcaaggggtcgaaggagcgcatcgtgccgttgcacgacatggccgtgtcgtccatgcgcgcctatgccacgtgggcccgcccgctgatcctgcgcgaccgcacctgcgactacttcttcgtgtccacgcgcggcaaccgcatgggcaccgacgccatccgcaagatgttcaaggacgcgctgcgccaggcaggtctggacgagtcgctctcgccgcacgatatgcgccataccttcgccaccgatctgctggacgggggcgccgacctgcgcagcgtccaggagatgctgggacatgccagcctgtccaccacgcagatctacacccatctttcccccggccgcctcaagcaggtgcacgcccgcacccacccccgaggatagagcaccgtgtcgaaccacccgtccctttgacacgctttccgtcccctggtgcgcgcttttccggttcccggccggttgcggagctgtgaccgcttcctgacggtcgccgcgcgccgcgcagccttcccgcctgttcctccacaatcgggtgcattcgtcgtgcatgttcgcgatgtgcgcgttgcgcaccgaccataaggaggtttccatgagcaagaagaagatgcgggcgttcgccggcgcgatggccgtcgtgctcgctttcgtaccgtttttgagcggctgcgcggccaacgacgccgaggacaacccgcaggcccagcaagagctgaacgccgacgagcaatcgcgcaacgaggccgagggctccatcggcgagaccgtgcaatacggtcaggtcatggctatgaacggttctacggccacggttgtggtaggcaccctcgccaatgcgaacgacggcagcggctcgcaggctttcaacgcgggtcaggacgagataaccttcgacgagggagacgtttccatcgtcgatgaatcgggcgccgaactcgagggccgcaccctttccgccgacgacgtcatcgtcatgcgcggcacgggatcgggcaccgacttcaagcccacgaccatcgagatcctcgacgttgcaggcgcgggaacgaatgccgacgatgctcgcgttccccagggcgtcaagtagcgcgtcgacgccgcgccgcaggccgatatcgcgctatggagaacgtcggcgcgcccttgcccccgtcgagttcgagcctataatgttcagatgcccgcgcgcggcctccgcgtcgcgggcgttcggatacaaggcgcatcgaaggagcatggcatgcagctgctgaaggtttcgaccgacaaacttctgctcgtcgccggcatcgtgtggctcattgccggcgcgaacatcgtgaacatcggtctttcggctttcctggacgagaccgggtggctgttctgggtcttgataggggggaccctcctcatattcgtgctgttccatatcttcgtgttcaccaagatggttggcaagcatgcgagcaggatcaggggctacgaggaagacaaaacccacctgttcaagttcttcgataaaaagggctacatcatgatggccatcatgatgggcggcggtatcgccttgcgcgcatcgggcgtcgtgcccgagtggttcatcgcgttcttctatacggggttgggcgctgcgttggcggttgcgggcgtcagcttcatactgcgttacttcaaaagctcgaagcctgcgtgtccggcgatgcccggcacgtacaccaaacatcataaggaatagcttcggggcggcaacgaaacggttacgcctcgccgacggaagcgcttcgctgcgtaccatggggaggtatcgaagtcgagggagccgtcttatgcggacggtgtgaggagggcgaatggcacggatattcgtcgtggaagacgacgcgtcgttgcgcgaggagcttatgcgcctgctcgaactgcagggtcataccgcgctgaccggcaccgccttcgaccgcatcgtggacgatgttttggcggctgcgcccgactgcgtgatcctcgacctcaagcttcccggcacgggcggccatacggtctgccgcgatctcaggcgctcgagtcaagtgcccgtcatcatgctcacgtcgtccgacagcgagttcgacgaggttctgagcatgaacctcggcgccgatgactacgtcacgaagccttacaacccagccgtgcttcttgcgcgcatccaatcggttctgcgccgtacgcagcgtaccgagccgccgacgcgtatcgagcatcgaggcgtggtgctggacgtggcgcgcgggcgggtggagcacggcggacgttccgtcgacctgacgcgcaacgagctgaagatcctccacatgctcatggcgaatcacgacaccatcatctcgcgccaggagctgatggtggagctgtggcagtccgatgcgttcatcgacgacaacacgctgaccgtcaacatcaaccgtttgcgcaagagcctggcgagtatcggcgtgcccgacgacttcctcgtcacgcgccgcgggcagggatacgtggtgtgatgcgcgcgccccgacgactccgggggtgccgtgcgcgatgagcccagcagcctttctcagggatcgtgccctttccgtcgccgtcgccatcgtgtgcgcgatcgcgatcggctccgtggtcgccgtgctcggtgccggtccggacgcctcggtgctggcggcatgcatcgtgctggcatgcgcggccttcgccctgacggtggactacgcgcgtcgtcgcgcgttttaccgcgatctcgaacaggtggtgggagacctcgaccgcacctattacgcaacggcgctcatagaacctcccgacttcctggaaggacgcctggcttacgaggccctgcaggcgacggggaaggccgccgccgacgacgtggccgcgcacaagcagcaagccgaagcctaccgcgattacatagagctgtggatccacgagatcaagacgcctatcgccgcggcggcgctcatggcctcaggcttgcacggtccccaggccgcacggatcaagggcgagctcgaccgtatcgagggctacgtggagcaggcgttgtactatgcgcgctccacctcgctcgtccaggactatgccatccgcgagacgagcctcgccgaggccgtgcgggaggcgctgcggaagcatgcgcgcttcctcatcgagcgcggcgtggcgccgacggtggacgtggacgaagacgttcgcgtgttcgccgacgtgaagtggctcgctttcgtcatcggccagctcgtggcgaatgcggggaaatacggcgcgagcacgctgcgcttctcggtgcgggaggagggagcagggaccagcgacgcgcgcacggtgctcgaggtggccgacgacggctggggcgtgccggccggcgacgtgcctcgcgtgttcgagcgcgccttcaccggcgagaacggcaggcgtgcgggctcgtccacgggcatggggctgtacctcgtggccgagctgtgcgcgaagatgggtctcgccgtggcgctggcctcggaagagggggagggcacgcgcgtgctgctggcgttcccgcacgatcgccgcaagctcgacctgctgtcgtgaacggcatgcgcttcctctgcctttcgtgcagcgatagcgggaaccgccgcagctggcaccgcgcgggatccttcgactccggcctgcggcctccgatcaggatgacggcctgcgggttcaggccgcgctgccttgcattttcgtaaggtacgcgtcacccgattcgatggcgcccgggcgcgccgcgccgtagcatggtcgaagacctgcaagcgaggaaggatacgatcatgaccgaagtctacgcgactccgcaaacccagacggcggcgcgccccggaggctcggctccgtctctcggcgcccgtcccatcctgtcggtgcgccagatcgagaaggtgtacggcaaccgcgattccgtcacccgggccatcaacgacatcagcttcgacgtggcccccggcgagttcgtgggcatcatggggccgtcgggctccggcaagacgacgctgctgaactgcgtcgccaccatcgacaccgtgacgagcgggcacatcctcgtcgacgggcgcgacatcacgggcctgcgctcccgcgcgttggcgaagttccgtcgcgacgacctgggcttcatcttccaggattccaacctgctggacacgctcaccggcttcgagaacatcgcgctggcgctgacggtgaagggcgagtccaccgcctccatcaagcctcgcgtgcaggctatcgcccgcacgttgggcgtggacgaggtgcttggcaagtacccctaccagatgtccggaggccagaagcagcgcatcgccgcggcgcgggccatggtcgccgatccgaagctcgtgctggccgacgagcccacgggcgcgctcgattcgcgcagcgccacggtgatgctggagaccctgtccatgatgaacgccgatctgcatgccaccatcatgatggtcacgcacgactcgttcgcggcctcgttcgccagccgtatcctgttcatcaaggacggcgcggtgttcaacgagatccgccgcggcgccacgagccgcggcgacttcttcaaccgcatcatggaagtggtgacgttcctgggcggtgacgtgcgcgatgctggctaaactcgctttccgcaacgttcggcgctcggtacgcgactacgctatctacttcgtcacgctcgtgttcggcgtggcggtgttctacgcgttcaactcggtgaccggccagtccatcctgttcgacctcgaggataccgccacggccagcgtgttcgagatgaccggtcagatgttggggatgttcagcgtggtcatcgcctgcgtgctgggctttctcgtgctgtacgcgaacgggttcctcatccgccgacgcaagcaggagttcggcacctacctcatgctgggcatgaacccgtccagcgtgtcggtcatcgtgcttctggagacggtggcggtgggcctcgtttcgctgggcgtgggcctggccttgggcttcgcgttgtcgcaagggctgtcgttcgtcacggcggggctgttcaacatccagatggaacagtaccgattcgtgttctcgaccaacgccttcctgctgacgctggggtgcttcgtgctcatcttcgccgtgacggggctgttcaacacgctgtccatccggcgctacaagctcatcgacctcttgtcggcccgctcgaagaacgcgcgcttccgcgtgcgcaacccctggatcagcctcgtcggcttcctcgcggccgtcgccgtgatcgcgtggtcgtacgttacgctcgtcgacaacggcctcatgcagttcgacgaagggttctggcgggccacggcgctcatggtggcgggcacgtttttgttcttctggtcgctcgcgggcttcgcgcttgcggcgatcgagcgcacgcgcggcatctacttcaagggccttgccatgttcacgacgcgccagatcgccagcaaggtgaacacggcgttcgtgtcgctgtcggtggtatgcatcatgctgttcttttcgctcacggtgttctccacgggcatgggcctggcgcgcgcgttcagcggcaacgtcgaggaggacacgctgtacgacgccacgctcacggcgaacgtgtacctcaacgcgggcggcatccacgacgaagaggcgctcgcgagcatgagcgaggaggatcgggagtatcagcgagtcgccgacgagaaggccgccgccatcgctgcggacgccgaggcgtacgattgggatatcgccgcgaagctggcggacgcttcgccgacgtgggacgcgctggtggatcgctcggtgcaggtcgacgtgtacgtggacgccgatgagagctatggcgcgatcatggatcgctacggcaaggacacgggcaacgataagcagaacgaggcgatgcacaggcagggcatctcgctggtcggggtctcgcagttcaatgcgcttgccgagctgacgggtcggcccacggtggacgtgggcgaggacggctacgccgtgaacaacacgctcgacggcatgcagggccttgccgaggcgctcgcaggcaaaggcgagaccatccaagcggccggtcgcacgctgacgtcgacgggcgagctgcggcgccagccgttggaggacgccgcgttcgcttcgagcggcgccgaggcgatcgtccccgactcggtgatcgccgacctgcgcgcccagggcgttgtgcccgagcagtccgtgctcaacctcatgtacaagacgagccgaaccgaaggcgacaagctgctcgcgcagatgctgggcgaggcttctcctcccagcgccgaggtggcggcttcggggtggaagttcggcccgaagccctggccggtgacgctctcgttcacagccgaggaggtggtcgtccagtcgagcggcatgaacatgatgatctcgtacctggcactgtacatcggcttcgtgttccttatcgccacggctgccattctggccatccagcagctgtccgagaccagcgactcgttggcgcgctaccgggtgctcgccgagatcggctgcgaccgccgtatgatcttccggtcgctgcgcgcgcaggtgctcgtgtacttcctcgttcctctcgctttggccgtgtgccataccgtatgcgccgtcggcgtcatcagcgatgcggtgctcgcgcagctgggcgtttcggtactcgagcccgcgctgatgaccggcgtgctgacaggcatcgtgtacggggcgtatctcctggtcacgcacttcgccagccgcagcatcatccgcgcttcgcttggcaagaagctgttgggctaggaagaggagccggttggcggccccgtcggcttgcgtcggggccgcctccgcatgctcgttgtcgcccgaaagccgcgttttcagcgtgaaaacagcggctttcgggcgacaacgtgtttcgggggggggtgccgcgcctcgaacgatgcgcggttagaacgagaagaggtcgcggacctgcacgtcgagggcgtcggcgatacggccgaggtcgtcgagacccacgctcacgcgtcccgactcgatgcgccagatgtgcgatttgctgctgccgatcatgagggcgagcttctgctgagacaggctctgcgcctcccttcgctcgcgaatcgcgctccctaaaagcactcttttcctatcagcatccattcgttcagattattcggtataatcctcaacacggcttcatatatgaagccgtgttgaggatgtgggaggaagtttgacggtgcgtaagcgaccctgggcggtcgagccgggcttcctcctgcgcgaaccggagaatcgatgatgaagatgttcaagaagaagacgagggttctgaacgccgagcttccgcgcccgctgcagcgcaacgcgatgagcacgctgtacgcgaacttggggttcatgagcttcgacaagccgatgcgcacgatcgtggtgacgagctcggtgccgaacgagggcaaaacgacggtggccgttgagctggctcgcgtgatggccgtggcggggaagcgcacgctgctcgtggaatgcgacctgcggcggcgctcgctggcggacaggttgggggtgcgcgctcccgtcgggctctgcgccgtcgtgatgggggatgaggaaccggggcgggctatcgtggccactcgtcagccgcgcatgcatttcctcgatgccgaagcaggcgtgaccagccccgtcgacattctcgattcccaacgattcaggcgcttgctcggatgcctggccgctcgttacgaccacgtggtcatcgacactccgccggtgggcgcgttcgtggacgccgccgtcgtcgcccaggtatccgatgcgacgctgcttgtggtgcgcgaaggcttcgtcgagcgcgcaagcgtccagaaggcagccgaacagttgcgcgcggcgggcgctaatctcgtggggacggtaatgaactgctgcgataccgcaacgtcggcctactatgccgcctacggggacaaagcggagtagggtctcggcatgcgggtcgaaggcgcctctactttcccagcagatggcggatggcggccaaaggatgctttttcagcatgcgcgggccggcgtagcgcatgacggcgcggatgcgttcgcgttcctcgggcttgtaacagtggtgctcgcattcgtcgcacgaggtcttcacgtccatcttgcggcagcgctcggtgcgcagcacggcataggcgtcgatgctcgcgcagccggggcacacggcctcgccgcagtgggcggtttccgttcgcgcggccgcgtcgtgattgtcggcgcagtacaacgccaccatttgggatatggtgcgcttttcgcggtcgcggcgccgagcgatcttggggctgtcctgttgggtcatgtgactcctcctggtctcgatcgcgaggataccagaatccaaccgaacgcgcacgcgcgtttttcccttgagtcggggaatgcggatcgacctcgaaccatgccgaatcgaacagtttgtgctcagaatttgaacgaatcagacgaacggatgtttttgcctattccgcggtcggactgcgctaaaatgagcgattgcacggaaatgatagttctccggtagccatattcgactccggcgccgcgccgggctgcgaacgatagaaagagcgataagccacatgggacagaacgccatcgtcatcaagggtgcccgcgagcacaacctcaaggacatcgacctctccatcccgcgcgacgagctggtggtcatcacgggcctgtcgggcagcggcaagtcgtcgctggcgttcgacacgatgtacgccgagggccagcgccgctacgtggagagcctgtccagctacgcgcgcatgttcctgggccagatgtcgaagcccgacctcgacagcatcgacggcctgtcgccggcggtgtccatcgaccagaagaccacgtcgaagaacccgcgctcgacggtgggcaccaccaccgagatctacgactacctgcgcctcctgttcgcgcgcgtgggcgtgccgcactgccccgagtgcggccgcgtcatcaagaagcagaccaccgaccaggtgaccgacgagatcctcgccctcgcgcccgatgcgaaggccatcatcatggctcccgtggtggcgggccgcaagggcgagttcacgaagctgttcgccgacctgcagaaggagggcttcagccgcgtgcgcatcgatggcgagatcgtgaagctggacggcgagccgcgcacgctcaacaagaagatcaagcacttcatcgacgtggtggtggaccgcgtgcagcttaaagcgagcgcgacgagccgcatcgccgaggcggtggagctggccacgaagttggccgacgggcgcgtgctcgtgcaggtgctgggcgacgacggcaagccgctcggcgagggcggcgggcgctcgtccggcgcgacgggcggcctgggcgcgggggagcacatcttctcgctcgcgctggcatgccccgagcacggacactccatggacgagctgcagccgcgcgacttctcgttcaacgcaccctatggcgcctgccccgactgcctcggcatcggcagccgcgaggaggtggacgcgtcgctggtggcgcccgacccgtcgctgtcgctgaacgagggcgccatcgcgccgttcaagaccggcaactactacccgcaggtgctgcgcgccgtggccgcgcacctcggcaccgacgccgacaccccgtgggaggatatgcctaagaaggcgcaggacgggcttctgcacggcctgggcaaggacaaggtgcgcgtcgactacgtcacggtggacggtcgcgagacgtactggtacatcgagtgggagggagcgctggccgcagtgcagcgccgctaccaggaggctcagtccgacgctcagcgcgagaagctggccagctacttcgccatcgttccgtgcccgacctgcggcggcaagcgcctgaagcccgagatcctcgccgtcacggtgaacgaacgctccatccacgacatcaccgagatgagcgcggcggactcgctcgaattcttcgacggcctcgcgttccacgggtcggaggagcatatcgccgggcccatcgtgaaggagatcaaggcgcgcctcaagttcctcgtggacgtgggtctggactacctcacgctggagcgcgccacggcgacgctctccggcggcgaggcgcagcgcatccgcctggccacgcagatcggcgcgggcctcatgggcgtgctctacatcctggacgagccttccatcggcctgcaccagcgcgacaacgagcggctcatcgccacgctcgagcgcctgcgcgacttagggaacaccgtcatcgtggtggagcacgacgaggacaccatccgcagcgccgacttcgtggtggacatgggcccgggcgcgggcgagcacggcggcgagatcgtggccatcggcacgccggacgagatcatgaaggccgaaggctcgctcacggccgactacctgtcgggccggcgccgcatcgaggtgcccgagaagcgccgcaagccgcgccgcgggtcgctcaagctgacgggcgccaccgagaacaacctgcacaacgtcacgctcgaggttcccttcggcacgctcaccgtggtcacgggcgtgtccggctcgggcaagagctcgctggtcaccgacacgctggcgccggcgctcgcgaaccgcgtgaaccatgcgcaccgccgcacgggcgcctacaagaagatcaccgggctggacaagatcgacaaggtcatcaacatcgaccagagccccatcgggcgcacgccgcgttccaacccggccacctacataggcctttgggacgacatccgcgcgctgttcgcctccacgcaggagtcgaaggcccgcggctactcgccgggccgcttctcgttcaacgtgaacggcggacgctgcgaggcgtgcaagggcgacggccagatcaagatcgagatgcacttcctgcccgacatctacgtgccgtgcgaggtgtgcggcggcgaccgctacaaccgcgagacgctgcaggtgacttaccgcggcaagaacatcgccgaggtgctggacatgaccgtggaggacgcgctggcgttcttcgagaacatacccggcatcaagcgcaagctgcagacgctgttcgacgtgggcctgggctacatccgcctggggcagccggccaccacgctgtccggcggcgaggcgcagcgcgtgaagcttgccagcgagctgcagcgccgccagaccggcaagacgttctacatcctggacgagcccaccaccggcctgcacttcgaggacgtgcgccagctgctcatcgtgttgcagcgcctggtggacgcgggcaacaccgtgctggtcatcgagcacaacctcgacgtcatcaagtgcgccgaccgcatcgtcgacctcggccccgagggcggcgagcgcggcggcaccgtggtggcccagggcacgcccgaggaggtcgcccaggtggagggcagctacaccggcgccttcgtgaagaagatgctggaggacggccggctgtagggaacgcaggccgagggatcttttcgaccgcttgctggtgttttgcggcgatctctcgaaaccccctttaccgcgtcggcgggacgtgcgacaatgcccgctttgcagacggcggagagagcatgcgggaagagggttcgattcaagtggcggaaacggtggcggggaaccgtcatgttgtgcgcggcatcgtatgcgcgcttgcgggcggcatctgctggggcttctcgggcacgtgcgcccagctgctcatgaacgactacggcgctcccgccacgtggatcacctgcgtgcgcatggtcatcgccgccgtgttcttcctgttccttaccgcggtgcgcaactggcgcgatctcgtagcggtgttccgagactggcgctcgctcgcgcagatcgcggcgttcgccatattcggcgtgctgttgacccagctcagctacttgaacgccatctcgtacacgagtgccggcgtgggcactaccatcgagcaggtggggctcgtgctcatcatgctgtacgtgtgcgttcgcgccaagcgcctgccgcgtgctcgcgaggcggcaggcctcgtgttcgcgctgggcggcatgctgatcatcgccacgcaaggcgagatcgaccagctggccatccccgccgagggattggcctggggcctcgtgtcggccgtggctttgacgttctacaccctcatgcccgtgcgcgtgctgaagaagtggggctccatgctggtgacgggccttgccatgctgttcggcggatcggccgcctcggtggtggtgcagccgtggaccatgcctgtgaacctgccgctcggcggcatcgcggcgctggttgccatcgtgatcgtgggcaccttgggagcctacatgctgtatctgcagggcgtgaacgacgcaggccccgtcaaggcgagccttctgtgctgcgtcgagcccgtttcggccatgatcctcgcgctcgcgtggctccatacgccggtgagcggctgggacctcgcaggatgcgcgctcatcgtgatcatgatcttcctcgtcaccgagcgagagccgaaaacggagcaggccgccgagggcgagggcgcgctcgccgacgcctacgacgacccgccgctgttcgcaggccgcgcttcggtgctgggctactacaccagccgtccggccacgcgcgatgatttcgagcgtgccacggcgctgctcgacgtcgggcatcagacgttcgcggagctcggcatagacgagggtcggagcaagaagtacccatcggcgcgtcgtctcatgcacagcatcaagaacggcacgacgcacgtcatcgaggatgcccacggccgcatgatcgcgatgttcgccgtgtccttctcgcctgacaagaactacgagcgccccatcgacggcgcttggctcaccgacacgtcggccgaaccgcagccctatgcggagctgcattgggtggccgtcgactatccggctcgccgccgcggcgtcggcatgttcatcctcgacaaggccgaccagatcgcccgtgcgggcggccggtccagcattcgcgccgacgtctacgagctgaacgggcccatgcagaacctgcttgagaagcacggatacgaacgctgcggaaccatcacgatcaaagacgtgttcgggcgtgtgaaacatcgcgtgggctacgagagaatgttgcgttgacggagggggtattcaccccttgacatggtgttttgctcgcctgtccaaaactggggcaaaactcttgcaaaacatctttaccgcgctgcccatacatgcgacaatgcgctgatgcaacgtggcgccggccgagaggcttgctgccgcgcgaggcgcaggatcgatgagaggaggaaacgtgggtcagacggtcgcatcgggctccgggcagggcggcggtaccgccgcatcgggcaaccacgtggtccgcggcatcgtcttcgcggctctcggcggcatctgctggggcttctcgggcacgtgcgcccagctcatgaccagcggtttcggcgttcccgtttcctggatcacctgcgtgcgcctgctgctggccgcggtcatcttcctcgtggtgtgcggcgtgcgggagccgcgcaacctgctggccgctctgcgcgacgtgcgctcgctcgggcgcatcgcggcgttcgccttgctgggcgtgcttctgacccaggtgagctacctgtcggctatctcctacacgaacgcgggcaccggcaccgtgctggagcgcctcggcctcatcgtcatcatggtgtacgtgtgcctgcgcatgcggcgcctgccgcgcatccgcgaggccgccggcctcgtgctcgccatcggcggcaccgtcctcatcgccacgaagggcaacctcggttcgttggccattcctgcggaaggcctgttctggggcatcatctcggcgttcgcgttggcgttctacacgctgcttcccggcaaggtgctggagaagtggggcagcttcatcgtgacgggcctcgccatgctcatcggcggcgcggtggccaccgtcgtcgtgcagccctggaccatccccgtcgaggtttcgcccgagcttgccggggtcatgttcgccatgatcatcgtgggcacgttcgccgcctacctgttctacctccagggcatcaccgacgccggccctgtgcgcgcgggtctcgtcggctgcgtcgagccggtgtcggccacggtcatctcggcggtgtggctgggcacgccggtgggcgtcgtcgacgtcgtcggttgcgccatgatcatcggcatggtgttcctcgtcaccgagcgcgaagagggctccggcggcgcggcctcgtacgacggggcggcatacgaccttccgccgttccaagggcgcgccaccgagctgggctactacaaggcgcgccgtgccacgcgcgacgacttcgaacgcgcgaaggcgttgctggaggacggtcatcgcgccatggcctcgctcggcataagggagggtctcaagaagtacccgtccgcgcgccgtctcatgcgttctatcgacgcggggaagacctatgtcgtggttgcgtcctcgagcggttcgaggacggatggctcctcggccgacgaaggccgcatcatcggcatgttcgcgctcaatcctcaaggcgatcccgcctatgcgcacatgacgggtgcgaagtgggccacggagccctcctcgcccgacaaccccgcctactcggcgctgcattgggtgaccgtggcgtccgatgcgcgaagacgcggcgtgggcggttacatcctgggaaccgccgagcgcatcgccaagggcgacgggaaggtcagcatctgctgcgacatctacgaggacaacgtccccatgcgcgagctgctgctgtcgtacggctatcagttctgcggcaacgtggagatccgctcccgcttcggccgcgtcaaacaccgagccgtgttcgaacgcgtcttgtagcctttcggcttcgccgctccaacccaacctctgttaagcgaacgtatccaaagaagaaagagaacctcctgtgcaatttcgcagaacctgcgcatgcgacatcgatcgcatcatgagcatcctcgccgacggccgcgcctcgctcgcagcgctcggcatcgaccaatggcagggcggctacccgcatcgcgccgtcatcgaggacgatacagctcgcggcgactcctacgtggtggaggccgacgaccgcatcgttgccaccgctatgatcggcttctcgggcgagcgcgactacgatcgcatcgaagagggctcgtggctcacttcctgcacgtccgagcgtccgtgctacggcgtggtgcaccgagtggccgtggcttccgacgggaagaatcgcggcgccgcgacgtttctgctggctcgcgccgaagagctggcgcgcgcgaacggaagcgccagcgtccgcatcgacacgcaccccggaaacgcgcctatgaggaagctgctggcgaaagccggctatgagcagtgcggcatcatctacatcgcccatgccgaaggggggacgcccgagcgcatcgcttacgagcggctcgtgtagccaggcgagcttcttccgagattctggcgaccggaaaggggcgtcgttgtcgggaacgcgccgttcgggcgcggtgccgttcagcttcctgtcgaaattctgtcgctcgcgcgctttggcggacgcccgctcgccacagggtataatacggagcactatgtcggtcaaatcgcgcgagaaaatagcattggcggtgttcgccgccctcatcgtgctgagccttctgggcttaggatggtacctggtcgccgggcattcctggaatgttgccgcgtcgaacatcgacgacacgttcggcagtatggacggctataccgccatcgtgtacgagggtaccgccgtgccgcagacggcagccgagaaggcggcggaagcggcgaaggaggaaaaggccgcgaagggggctgctggttcggcttcttcggacgagaagaggtcgcacgagctcgatcctgccgccgatgacgacgaagggaagccatccgagcgcgaggaatccggacgggaagcggacgagcgggagcttcccgaaaaggatgctgcttcgtcggcggtcgaaacggaaccggatgcgagcgcggcggcgggagcgcgctcgaacgggacgagcgcgaagtccaagccgaccgtgacggtggcggaggctcagaaaagctacgaggacaagaaggccaccgtgttctccctggacacgaccgatctcgggcagtacggcgaaggcatcatcctcaagaagggcggtcatcgcttcggcgtgttcagcgtgaccgcccccaccacggtgcgcgccatcgagaagcaggtggcgtacttcgtcaagtacaaggtggacttcatcgtggccataacgcccgacaaagcctacgtcgacgacgcctccggcatcgacatcgtgatttcgactcaagacgaggacctgttcgtgatgggcgaaaccatcgacggcaccttctatgtggacgctcccgaggcgggcaaggtcggcaccatcctcatctcccccagcaacgttgtgtcggcgaaggtcatcgaagagctgtgatcgtcagcgcatcgagacgaaccgacatcccgcggtttcatttcgactggctgctcggacggttcgaagagggcttcgcgctcgtgcgcaacccggcggtgcgcactcgggtgagccgtgtgatcctgtctccggacacggtggattgcgtcgcgttctggacgaaggatccttccgtgctgctcgcgcgcaaaaccgagctggatcgcgtctgcccatcgccctatttcgtgcagttcacgctcaacgcctacggtgccgacgtggaggcgggcctgccccgcaaggcgcggctgctggaaacgttccgctcgcttgcggacgctctgggacccgatcgcgtggtgtggcgctacagccctatcctgttgggaggcgcctacgacatcgcgcaccatatgcagtggttcgaggcgttcgcggcgcggttggaaggcagcacgcgcacctgccgcatcagcttcctcgacatgtacccgaagatcgccggtcgcatggcggcgctcgggttcgtcggagtgccggaagaggcgaaggccgcgcttgcgctgcggctggccgaactgggcgccgcgcacggcatcgaggtgggcggttgcggtgacggggcgctcgacgatgcggggctggctcgagcagggtgcatcgatgccgctgtcgtggagcacgttgcaggtgtacgggcaaaacgcgctccgggcggcgctcggaggggagcctgccgttgctcgccgagcgtggacatcggcacgtacgacacgtgcgcgaacggctgcgtgtactgctacgccaatccggggacgtcggccgcgccgtgcggggcggccgatccctggcgcttgcggcgctacgatccggcttcgtcgatgctctgcgacgagctggctcccgacgatacagtggaggaatgcgcctcggccaagctgcccgaagcgccgcctcgcctgttctgaggataggtgcggcgttagcggaggtcgctcacgtgctcgcaggcgtcgccgtagggcgcgtaccgataggatgccgtgacctccaggccgttcgccggatcgagcgcgatgaagttgtcgagcgagagcgcatcgggatcctccacgccctggtagcccatgaggcagatccagtgctcgccgtaagggcccgccacgtggacgaccgtgggccgtccggccgcgatctcgtcgtaggcctcgcgcagcaaagcctcgtcggagccgagcgagcggaacgacgaattgccgccgccccagccgggccacgtgcagcagccgcagccgtacgcgccgtggtcgttggcctggccggtgaggatcgcgtcgccgtaggcgcacgcataggcggggcagcagatggtgtggccgcccgtcgactggttgccgatggcggcgatgagggcggggtcgtagtcgaggcgcttgtcgcgctgttcggcggactgctcggctgctcgctgcgccgcgagagcgcgcacctgctcgaggtcggcgacggcttcttcggcggcagcgcccggcagcgtgacggctgcggagaggacggcgggccggacgagggggatcgcgggagctttttcgacggcgaacgcagcttgcgagggtgcgatgcacgcgatgccgagggagaccgccgcgcagaacgcgagcgcgcgacgggaggggtgcgataccattgaggcatccttcctgcgtccgcgtcgggttcgttggcgtggtatggttgcgggcgcgaagaggaatggtaacaaaacggcaacgtcgcagttcgcgaccgtatgaatgtccggcgaaccgtcacacgaggttcaagaatccttcacaggaacttggcgggcaggccgcgttccgcgtcggagctcctcatgcgaagcatccgctccgatcggctgttcctctcccgtcgccggatcccggacgagcctacggcaggaggggtacaatgatgcagaacacgaatcgcgccgtcggaacggcgcgggaacaggagcgtgcttatgcgaaccatcgacaccgacgtggtcatcgtgggggcgggccccgccggtattttctgcgcgctctcccttttggagcggggcttcacggggcgcatcgtcatggtggacaaaggcttggcggtggaggatcgcgtatgcccgaagcaggcgggcgcgccatgcgcgaactgcgaaccctgccgtatcacgacggggttctcgggcgcgggagcgttctcggacggaaagctgtcgctgtcggccgacgtaggcggcgacctgcccgacctcatcgggcgtgatgaggcgcaggacgccatcggggaagtggacggcgtgtacctgggcttcggcgccgacgtgcgcgtggagggcgcagaacgcaaaccggaggtggacgagatccgccgccgcgctatcaaagcgggtctcaagttggtagattgcccgctgcgccatctcggcaccgagcgcgcccgcgatctgtacgcgcgtatcgagcgccacctgcgcgaggcgggcgtagacctgctcttccgcacggaatgcacccaggtgctcatcgagggagagcggtgccgaggcgtggccgtcgccggcccggacggcgcgtgcgagatccgcgctcggcgtaccgtggtggccacgggccggcgcggcaccgactggctcgagcgcatgtgccgcgagcatgcgatagcgcacgcacccggtcctgtggacatcggcgtgcgcgtggaagtgcgaaacgaggttatggagacggtgaacgacgtgctgtacgagagcaagctcatcggttatccgcgcccgttcaagaacaaggtgcggacgttctgccagaaccccggcggcttcgtcagccaggagaactatgacggcggtctcgccgtggtgaacggccattcctacaaggagcgcaagtcgccgaacacgaacctcgccatcctgtgctcgcagaatttctcgcaccccttcgaccagcccatcgcctatgcccagaaggtgggcgagctcacgaacatgttgggcgacggacgcatcctcgtgcagcgcttgggtgatatcttcgacggcaagcgcacgtgggagaaggagctcgtgcgctcgaacgtggcacccacgctggacgatgcggtggcgggcgacatcacggcggccatgccgtaccgcgccatgaccaacatcctcaatttcatgctggccgtcgacgaggtggtgccggggttcgcagcgcaggagacgcttctgtactctcccgagctcaagttctacagcaaccgcgtcaagatggacgaacgcttcctgacgagcgtatgcgaccttatgtgcctcggcgattccagcggatggacgcgcgggctcatgatggccagcgtcatgggctggctagcagggcgtgtcgtggcagaggagctgtgaacaggcaggacgcatcccgtacgccgtttgcatgacatggattcgcgcttctatgcgcataaaatcatgcgtctgcacgataggcgcgccgcccgttctggggcatgatgtgcctcgttgaaaccggcggcggctcacaggcgagacgcgcgccaccgatacgctgtaggaggcgcacatgaaaatcttaggcatgggggtacccgagctccttatcatcctcgccgtcatactgctcatcttcggccccaagaacctcccgaagctcggcgcgtcggtgggcaagaccgtgaagagcctgcgcgaaggcctcggcggcggtgagaagctggtggaagccgacgacgaggaagaggcggttgaggaaatcgtggaggaagctgctcccgctgccgcccccaagaagaccgtcaaggtggccaagaaggccgacaaggtcgcataaaccaacctatccttcccttaccgaggcgcgaaccctccctccctcgcgcccagcaaccgcccgcggcatccgtgccgtgggcggttgcgcattttgaggagggcgggcggcaggcgcgaagcgacacggcatctccgttatgatggagctgtaaggcctgacggagaaaggggagcacgtgcatctcggcttgcgcgccgataaggaaggcagaacggcggccttgcgggtgatcggcggtttcgcctgcaacgaggggttcgtgttctcgttgttctaccttggagagaaccgcgcgttcggggacggcccgttcgccttcgagcgcgccgacctatggggcacgctcgcgtgcatgctgatcgcgttcgcgctgctgcggatggcttcgccgcgtgcgcgcgatgcgctgctgtctcggccgctcgtgtggtgctacgccgggctgctggtgctgggctcgctcatgcccgccatcgccggagggggcgaccacggcatcgtgctggagagcttgctcgtcggcctgccggcgggtttcatgttggccgcatggggccgggcgctcgggcgccggccggtgggcgattcggtgccgcaggtgttcttgtccgcggccgtcgcggcaggcgtctgcctgctcgcggtcgcgatcgccgcgccccaggcggcgttcgccctcaagctgcttccgctgggaagcgctttcgcgctgcgcgggctgctgccgacgcgcgccgccgcaagcgaggggacgtcccagggaggctccttgtccttcggcgacctcttggcgacgaaggagcagcgtgacgagacggcgcggctttcgaagaagatcatcgccggtaccgtgttgttcggcctggccgcaggcttcatggagacgttcggctccgatcccggcatggcttccacgcccacggtgctggccagcttgctgctgctcgtgctgttctgcatcgcatcgctgcagcttctgggcgtgagcctcggcaaggcaggggatccggcgggcaagacgggcggcgccgtggacgggccgctcgacggggtgtaccggttggccgttctggtgatgatggcgggttttctgttcgtgcccgtgttgggctcgttcggcgttccgggcgaggccatcgtgctggcgggctatctggggctcaccttcgtgctggtgtcgctgttcctcgtcatggcgaagatcacggggcaggatgccgccgtttcgttcgcgcgcgggttcgccgcgctgtacgcgggcgagctggcgggcatcgcctgcggcaacggcatcgagcttttggagccggccgggcaggtgccctacgccgtcgccgcgttcgcgggcctggccgcgttgtacgcgtacctcttcctgttcaccgagcgggatttccgcgccctgtcggtcatcgtgcgcgatgccgaccgcttcgacgacgcatgccgtctcatcgcctcggagcacgggttgtcgaagcgcgaagccgagatccttccgttggcgctcaaggggcgcacgggggagcgcatcgccgcggagttcttcatctcgaagagcacggtggacacgcacctgcggcgcatctacgtcaagacgggaacgcacggccgccaggagctcatcgatttgggcgagcggacgtcgcaggatctggcacgacgcggctgaggagggcgccggcgtgatgggaaagcgcgtgaaacgtgcagggtacccgatgccgcgcgctgatcggcacatgtgcgaagagagacagcgtgcgagggccgggcgctagcgggcgctcctgcgggcggcccgcagcgcgcggaactcctgcggggtggcgccgaagcgctccttgaaggcctccgagaagctgccctggcgcgcgaagcccagccgggcggcgatctcggccatgctgaggtcggtgtcgcccaggagctcgcaggcgcgctccatgcgcagggtgcgcgcgtactcctgcggcgtcatgccctcggcctgcttgaacagcctcgtcagcttgctcgcgctcatgcaggcgatgcggcacagctcgcttgagggcacggcgcggtccaggtgctcgcggatgtgggcccgcgtcaggttgagcgcgctgcggtcggccgcgcggatggcgctcgccgccccgcgcgcgttggccagcgaccagtccagcagcatcgccgcggcctcggtgaccttcgcctcgtagtaggccggcgcggtgatggacgagggccgcgcccgcttcatctcgtcgaacaccatgttgaggccgggcacatcctgcatgccgtcgagcgaggcgatggcgcgggagagcacgagcgggtcgcagtggcacgccaggctcaggcgctgcaggcccttcggcagcatgcagatgctcgtcacgtcgaggcgctcgtcggccttcgtcacctgcccgtagggctgcgacttccacgcgtagcccagcagcgtccggtcggcggggtcgtcggtgatgccgaagtagggcaccatgttgcggccgtacgacccgaagcagaacaggtcgggcgtctggcaggtgaagcctacctcccggttgaactgcaggtcgaagatcgccacggacaggtcgtcgcccagcgggtagtaccagtaggttccctggccgtagcgctcgtcgatctcccagagcatgcccacgcgcccgcgctcggcggcctccacgcgcacgccgtgcatggaggcgatctgcgtctcgtagatgtcgtggacggtgaacgggccgttcgaccccaagccgtccgccagcgaggtgcgttgcgccaggtaggccgcccgcgagcgcgccgcggggtcgcccccgacgccgatcaggttcgactcgacgagggcgcgcgagcccgatcccgccgccgcgcacctcatttcggcgtcatcgtctagaatttcggctgaatcatcgcgatcgctcattgcacgccgctccttttcgttgcatcgctagattattagtcatggctaacttcaaggatataccagacttcgcgccctccgcaaccctttggtccgccgagggcgccgctgcgggcgccccggcagcctcggcagccccggcctgcgcggcggcgagcgcgcggcgggcgggcgcgcgccgccggctcgacccgcgcacgtcgctcgccgtcctgctcatgctgaacctcatcgcgttcgcgccgacgaagccgtggaccgaggtggcggccgtggcgctgtgcgccgcgacgatgatctggtgcggccgcgcgtcggcggcgctgcgctggctggcggcctacgcggccgtcttcggggccagcatggccgtcgccgcctttccgaacgaggtgaccgcgtcgttcgccgcgatgatcgtcgtgttccgccgcgtgttctgcgtggggatgttcgcgtcgaacatgatcgccaccacgcgcgtgggcgagatggcctcggcgctgcagcgcgcgcacgtgccgcgcggcggcgtggtggcgctgtgcgtggcgctcaggttcttccccacgatgggcaaggagttctcgtcggtggccgaggccatgaaggtgcgcggcatggcgctgtcgcccgcgacggtgctgcggcatccggcgctgacggcggagaacctcatggtgcccgtgatgagccggctggccatcgtggccgacgagctgtcgaacgcggccatcgtgcgcggcatcgactccgcggcggcgcgcacgtcctactacgagctgcgcttcgggccggcggacgccctgttcgccgccctgttcggcgccgtggtcgcgtgcgtggcgctcatcaagctgggggtgatcgcgtgagcgcgcaggccgacgcggcgctttcgttcgaccgggcgggcttcacctacgccggcgcccgcgagcccgccctcgccgacgtgtccctgagcgtgcccgcagggcagtgcgtggtgctcaccggcggctccggctgcggcaagaccacgctcacgcgcctggcgaacgggctgatccccgtctcctacgacggggagctcgcggggtcggtgcgcatcgccggcaaggacgcggggtcgtgggagatggacgcgctgtgccggcgcgtgggctcggtgttccagaacccccgcagccagttcttcaacctggacaccacctcggaggtggcgttcggctgcgagaacctcgggctctcgcgcgccgagatgcaccggcgcgtggacggcgccttcgccctgctgggcatcgagcacctgcgcgaccgcgacatccgcgcgctctcgggcggccagcgccagatggtggccatcgcctcggtgtgcgcgatgggccccgacgtcttcgtgctggacgagcccacggcgtcgctcgacgtgggcgccatgctccagctggccgaggcggtcgcgcggctcaaggccgcgggcaagaccgtgctcgtggccgagcaccggctgtggtggctcgcgggcatcgccgaccgggtggtggtgatgcggggcgggcgcgtcgtgcgcgacgcggacgccgccgctttcgcgcggatcggcgaggacgagcgcgcgcggctgggcctgcgcgcctgggacctggcgcgcgtgtcgccggcgcgccgcggcgacggctccgccgcgtcgggcgcgcgcgccgccgacgaggcccccgcgctcgacgcggccggcctcgaggcgggctacggccgcgacgcgcccgtgctgcgcggggcgggcctgcggctggacgccgggacggtgacggcgctcgtgggcaggaacggcgcgggcaagaccacgctgtcgcgctgcctggtggggctgcaccgggagcgcgcgggcagcgtccgcttccgcggcgaggagccgcgccgccgcgaccggcccgagcacgcctacctcgtgatgcaggagaccggctaccagctgttcagcgacaccgtgcgcggcgagctgctgggcgcgctcacgcacggcgggctgcggcccgcgcccgacggggcggacgggcaggcggaccgcgcgctcgcgcgcttcggcctcgaggacatcgccgagcgccacccgctctcgctctcgggagggcagcgccagcggctggccatcgccgtcggcatcctgcagggcgcccgcgtgctcgtgctcgacgagcccacgagcgggctcgacttcggcaccatggggcgcgtggccgacgaggtgcgccgggcgcgcgacgcgggagcgtgcatcgtcgtggtcacccacgactacgagttcgtctgcgccgcctgcgaccaggtggccgtgctcgaggacggcgtcgtgtccgacgtgctgcccgtgcgcggcgaggccctcgggcgcatccggcgcgcgatcggcatcgacgggcgggcgcgcccgctctgaccgaatctgaccgaaggcatcgaccatttcaagagaaggagatacgcttatggcaacgacgacggttgccgcctcttcgggcggcgcgaacgcgaagggcaagctggtggggaaggactacatcacgctggccatcttcggggtgctcctgttcctcgtgttcatggtgttcgcgatggtgctgggcatgaacgcgaacctgttctggttcacgcacgcgtgcggctcgctcatcggcggcatcgtgtggatgtacgtggccgcgaaggtgcccaagcgcggcgcgttcgccatcatgtccgcgatcgtcgcggtggtggcgctgctgctgggcatgctgtggaccggcccggtgggcatcgtggcgggcggcctgctggccgagctcgtggcgggggccggcagcaagcgcaccacgctgcgctgcctggcggcgttcgcggtgtggacgctgtgcttctgggtgggccaggagtcgatgatcttcctagcgggcgacgcctacgtgcagatcgtggtcgattccggcatgagcgccgagtacggccaggggctcgtcgacttcatccacggcccgctcgcgctggtggcgctggccgcgaccgcggtgtgccccttcgtgggcggctggatcggctcgaagctgttcaagaagcacttcgccaagatctcggcctgagcgccgcgcccttcggccgacgaggcgccgaacgaacggctccctttcgggggagccgttctctttttcggcggcatcgtccaatcggcatcgacgtgcagcggatttcggcgggatcgctattatgttctcttaggctaacaataagcacgttacggcaaggaaaggaacgaatcgtgtcaagaccgcagaatcccatcgtgcggctgctggagttcgccgggccccacaagcgcttgaccatcgcgggctgcgcgctctcggcgctcaacgccgtgctggccatcgcgatgctcgtgtgcgtgtggttcgtcgtgcgcgacctcgtggccgtcgccccggcgtggggcgaggcgcggcaggccccggtgtacggcgcctgggcgctggccttcgcgctcgcgggtctcgtcgtgtacttcgccgcgctcatgtgcacgcacctcgccgcgttccgcacggcgacgaacatgcgcaaggcggcgctcgagcacctcgcgaaggtgccgctcggctacttctccgtccgctccaccggcgagctgcgccgcgtcatcgaagggtccacggggctcaccgagggcgtgctggcgcaccgcatccccgatttcgtgggcgcgctggtcacgcccgtggcctacctcgtcgtcatgttcgtgttcgactgggtcatgggcctcgtgtgcctcatccccgtgctcgcctccgccttctgcatgttcctcatgatgggcggcggcctgggcggcaaggacggcgagggcaactccaacgccatgcagttcatggtgaactaccagaacgcgctcgacaagatgaacaaggccgccgtggagtacgtgcgcggcatccccgtggtgaaggtgttccagcagaccgtccactcgttcagggcgttccgggagtccatcgtggcctactgcgacttcgccaccgcctacgtgaagctgtgcgagggcccgcaggtggcgcagctcgtggccatcaacgcgacgttcttcgtgctcgtgccggcgggcatcctgctggcgggcgcggcgggcgacttcggcgcgttcctcacgaacttcctgttctacgtcatcttctcggcgctcaccaccatgatgatgagcaagatcatgtactcgtcgcaggcggtgaccgaggcgcaggacgcggtgagccgcatcgacggcatcctgtcggcgccgctcatggccgaggtggacccggcccgggccgaggcgcccgccgacgacgccatcgacttcgaccacgtcacgttctcctatccgggcgccgacgcgcccgcgctcgaggacgtcgtgctgcacgtgccctcgggcgccacggtggcgctcgtggggccctcgggcggcggcaagaccaccgcggcctcgctcgtgccgcgcttctgggacgcgagcgcggggcgggtgctcgtgggcggcgtcgacgtgcggtccatcccgcaggccgagctcatggagcgcgtggccttcgtgttccagaacgacaagctgttcaagcagagcctgctggacaacatccgcgccgcgcggccggaggcgacgcgcgaggaggtggaggcggccgcgcacgcggcgcagtgcgacgacatcgtggcgaagctgccgcaggggctcgacaccgtggtgggcgcccgcggcgtgtacctctcgggcggcgagtgccagcgcatcgcgctcgcgcgcgccatcctgaaggacgcgcccatcgtggtgctcgacgaggccacggccttcgccgaccccgagaacgaggcgctcatccagcgcgcgctgggggtgctgtgcgcgggcaagaccgtgctcatgatcgcgcaccggctgtccaccgtggccggcgccgacgccatctacgtgctggacggcggccgcctcgcggagcaggggacccacgccgagctggtggaggcgggcggcttgtacgcgcgcatgtgggccgactatcgaacctcggcgcaatggcgcatcggaaaggagggcggctatgctgcgtgattccctgggcctcaccgacgtgggcgcgaagaacttcaggcgcggcgtgttcttctgcacgctggcgaacctcgtgctcatggctccgatcggcatcctgttcctgctggtgagcgacttcatggaccacctcgtggcgggggccccgctgcccgcgctggcgccgtacctcgcggggtgcgtcggcatcctcgcgctcatggtcctcacccagtgggccgagtacgcgaacacgtaccacaaggtgtacgaggagagcgcccgcaagcgcaccgacctggccgagcacctgcgccggctgccgctgtcgttcttcgggcggcgcgacctgtccgacctcacgaacgccatcatgaaggactgctccgaccaggagcgcatgttcatgcacgtcatgccgcagctgttcggcacgggcctgtccacggccatcgtcatcgtcggcatcttcttctacgactggcgtctggcgctcgcggcgttctgggtggtgcccgcggcgctgctcgtgatggcgctcaccgggaagcaccagcagcgcaaggcgcaggcgatggaggacgcgcgcctcgaggtggccgacggcgtgcaggagttcctggagtgcgcgcaggagatccgcgccacgaaccgctcggcggcgcatctggacgcgctcgcggccaagctcgacgcgttcgagcgcaggcaggtggcgtccgagctgaccaccggcgtgttcgtcacctcggcgcaggcgttcctcaagctgggcatcggcaccaccgtcttcgtgggcgcgacgctgctcgtgtccgggcagacggacttcatgacctacttcgccttcctgctcgtggtcacgcgcgtgtacgatccggtgaacctcatcctgcagtccatcggcgagctgctgagcatgcggctgtccatcaggcgcacgcaggagctggccgccgagaagcccatggagggctccaccgacttcgcgccgcgaggccacgacgtggtgttcgaggacgtgtcgttctcgtacggcgacggcgagcaggtgctgagggacgtgtcgttcaccgcccgcgagggcgaggtgacggcgctcgtgggcccgtccgggtcgggcaagtccacggtggcgaagctggcggcgcgcttctgggacgccgacgcggggtcggtgcgcgtgggcggcgtgaacgtggccgacgtggaccccgagacgctgctggccgactacgccgaggtgttccaggacgtggtgctgttcgacgacacggtgatgggcaacatccgcctggggcgggtcggcgcaaccgacgaggaggtgctggcggcggcgcgggcggcgatgtgcgacgagttcgtgagccgcatgccgcagggctacgacacgatgatcggcgagaacggcgggcggctgtcgggaggggagcggcagcgcatctccatcgcgcgcgccatcctgaaggacgcgccggtggtgctgctcgacgaggccacggcctcgctcgacgtggagaacgagacgcaggtgcagcaggcgctgtccaggctgctggccggcaagaccgtgctggtcatcgcgcaccgcatgcgtaccgtggccaacgccgacaagatcgtggtactcaaagagggccgcgtcgccgagcagggcgcgcccgccgagctcatggcgcgcgagggagggctgtaccggcgcatggtggagctgcagaccgaagcttcggggtggtcgctggcttcctgacgcctcgcttctttccttcggcgatggcgctcggcatgccgtcgcgccgggaaaccgtcgggatgaggcgcgcgcgacagggctgcatgcgccgttatgcgttaccatggtgcgaggcgcatagcgcggcttggagccgcgccgaggaaaggatgtagacagtggatcgcgtgttgctgaaaggcgcgctggccgagctgttcgacgaaggggcggctcgcttcgacgcttcgatggcggagctcacgacgtttcgtatcggaggtccggccgacgttctcgtggagcctcgcacggcgggcgaggcgcgtgtcgtattggaggcatgtcgccgcctgggcgttgcggtgcgtgtgatggggcttggcagcgacgtgctggtggcggacgaagggcttcgttgcgtcgtcgtgcgcatcgccgagagcttgtcgcaggtggaggttgacggcgagcggatgcatgtggaggcgggcgcgtcgaacgccgacgtggcgcggcgcgcatgcgaggaggggcttgcgggatacgagttcgcctgcggcatcccgggcaccgtgggcggcgcggccatcatgaacgcgggcgcctacggaggcgagttcaaggacgtggccgaatcggtgcgctgcctcacgccggagggcgagctggtggacgtggacgccgagcgggcgcagtggtcgtatcggcattcgatgatgggcgaggccggtttcgtggtgctgggagcgacgctgcgcctggctcccgacgacccgcgcgccatccgggagcgcatggacgacctcgcgcgccggcgcgccgagaagcagccgctcgagctgcccagcgccggaagcaccttcaagcgccctgccgggttcttcgtcgggcagctggtgcaggaggcggggttgcgagggtaccgcgtgggcggtgcccaagtgtccgagaagcacaccggtttcgtggtgaacgcgggcgacgccacggcggccgacgtgcgccgcctcatcgccgatgtgcaggagcgcgtgcgggcgagcgccggcgtggatctcgagcccgaggtgcgcatgtggggcttcgaggaataagctcgtccccaatatcttgcgacaaaggaacaaatgtttcacgtgaaacatttgttcgcgcacgaagatgacgggaggcggcaaccgctcgcttaggtaacgggcgggcgtgcgcttgcttggtcgatatagagggcgagcgctcctttaggtgaactgccctttcctatgaatcacggaaatgttactattgctatagcataagtggacgcaagggggcgtgcgtatgatcgatcgggctttgttcgcgctggagggcatccgcggcgcgctggcggcgctggtggcccttgccgtggcccgggcgctgctcgtggtggggcaggcatggtcgttggcaagcgccatcgtgcatctatgggaaggcgcgccgctgcccgaccaggctccgctcatcgtcctgttcttcctctgcttcgtaggcggccagctggtgcgctacgcgcaggactcctatctcgaccgctacgcctacgcacgcatcgacgcactgcgccgcgagcttctgcaggcggtgttcggccagggtgcgcgcatcgtgcaagctcagggcaccggcagcgtcactgcgatggtgttggagggcatcgaccaggtggagacgtacctgcgcctcatcctgccgaagatcgtgtgcgtggtcgtggtgccgctcatcgtgcttttgtgcgtgttcccggtggattgggtgtcgggttccatcatgctggtcatgtacccggtcatcgtgttctacatggggctgatcggcgcgacagcgaaggcggccgcgtcgctgcagcacgaggagtaccagcggctgtcgaatcacttcatcgactcgatgcgcggcatcgatacgctcaagctgttcggccgcggcaagcgccacggcgagcgcatcttcgaggtgagcgagcgcttccgcgaggcaacggttaagacgctgcgcatcgccacgttgtcgggctccgtgctcgacctcatctccacgctgtcgctggcggccgtggccatcatgttgggattccgcctcgtggacggttcgatcgccttcttccctgcgctgttcgtgctggtgctggtgccggagtacttcaagcccatccgcgagttcgccagcgactaccacgcctcgctcgacggcaagaacgcgctggcctccattcagggcatcatcgcgtcggcggaggagggcgcgtcggacgttgcaggcgacgaggccgccgcgctgcacgacgttcccgtctggagcgaagattcgacgctcgagctggacggcgtgcgcttctcgtatcccgagcacgaggcgctttcggacgtgtccttcgccgtgcgcggtttcgcgcgcgtcggcgtcatcggggccagcggctcgggcaagagcacgctcgtgaacctgttgggcggcttcgcggctcccagcgcgggcacggtgcgcgccgcagggcggcagctggcagacctgcgcgagccttcgtggcagcgccaggtgctctacatcccgcaggacccgtacctgttccacgccacgctgcgcgacaacatcgtgttctaccgccccgatgccgacgacgatgaggttgcgcgcgcggtggaggtcgtggggctgggcgatctcgtggccgagctgccggacgggctggacacgctggtgggcgagggcgcccgcgcgctgtcgggcggccaggcgcagcgcatcgcgctggcccgcgcgcttctggacgactcgcggcgcatcctgctgttcgacgaacccacggcgcacctcgacatcgagaccgagttggagctgaaggagcgcatgctgccgctcatggaaggccgtctcgtggtgttcgccacgcaccggctgcattgggtgcacgacatggacgccgtgctggtgatggaggacgggcgcgtggccgagttcggcgcgccgaaggagcttgccgcgcgcgacggcgcgtacgcgcgcttggcgtcgcggttggaaggaggcgcgctatgagcagggaaggcgaagccgcgcagggcgccgtgccgcgcgaggaggggttcgcgagcgtgctgcgccgcgacgcctgggtgaagccgttcttcttccgttaccgcaaggcgttggcgttggcgcttttcctggggctgctgacgttcgggttcgcctcggcgctgatgtttacctcaggctacctggtcagcgcttcggcggtggttgagaccatcctctttctgcacctgccgctcatcttcgtgcgcatcttcggcgtgggcaagcccatcctgcagtacctcgagcgcttgaccagccacgactgggtgctgcgcatgaccagcggattgcggttgaagctgtaccgcgcgctggagcgcgacgccgtgttcttccgcgccacgcaccgcacgggcgacgtgctgggccttctggccgaggatatcgggcacattcagaacctgtacctgcgcaccgtgttccccacggtgacggcatggctgctgttcgtcgtgctggtggcatgcctgggctggttctcgctctggctcgcgctggcgatgctgctggtgctgggcacggcggtgttcctcgtgccgctggtgtcggtgctggcgaacgccgcgcgccaggcgcgccacaagcagatgaagaacgagctgtacgccgagctggccgacaacgtgctgggtgtgtccgactgggtgttcgccgggcgcggcgaggagtacctcacgcgccataaggagcgcgagctgcggatgcgcgacgtgcaggagcgcatggagcgcttcggtcggcgccgcgacgtggtgctgcaggcgctgttcggcatctgcgccgtgctgctgctggtgtgggcgggcgggcgcttcggcggggaagggggcgacgcggccaactggatcgccgcgttcgtgctgggcttcttcccgctcatcgacgcgttcgcgcccttgtcgtcggcggcggtggaggccggcgcctaccgcgattccatcgcgcgtttgaacgacctgccgacccccggcgaggagaagccgtccgcgcgcgtgcccgaggcgccgttcgacgtgcgggttgaccgggcggagtaccgctatcccggcacgtcgcgtgacgtgctgcgcggcctgagcctgacggtgccgcagggccagcgcgtggccgtgctgggccgcagcggcgcgggcaagagcacgctggcgtccctcgtgcgcggcgacatacgacccgatgcgggcggcgtgacgctgggcggctcgcccacggccgacctcggcgacgaggcggcgaagtggatcggggtcatccagcagcgcacctacctgttcaacatgacgctgcgcgacaacctgcgcatcgggcgcgaggacgcgaccgacgacgaggtatgggacgcgctgggcagggtggggctgcggtcgatggccgagcggctgccgaacggcctggacacgctggtggacgaggccggcctgcgcttctcgggcggcgagcgccaccgcgtcgcgctcgcgcgcgtgctgctgcaggacgtgcccgtggtcatcctggacgagcccacggtaggcctcgatcctatcaccgagcgcgcgctgctggacgacctgttcgaggcgctggcgggcaagacggtgatcatgatcacccaccatctggccggcgtggacgccatggatcgcgtcgtgttcgtggaggacggccgcatcgcgctcgacggcgcgccggacgagctcgcgcgcacgagcgagcgctaccgacgtctgctggccttcgaccgcgggcaggcggcgggccgctagccgcgggcgcgcagaagggcggttgcgtcctcgggcgcgagcgcgcacacggtggatctcctgagcaggcctttgtcgcgcgttacgatgtagtcggccttcgcgcgttcggcgcttggcagggcgctcgcattctcgggctcttgcattgaaaacggggtttttctcccatgtcctcgacttgtgcgcaccttcgtcacgtcggattgcccgtttgggacgtgttcggcccgtttctcttctcgaaaccgcaggtcagtagttagacatggaaatttatacgtgcgagtcggctggaagcgtgcgcataagtcggggacatggtgattttcgagcatattcgatgctgaaagggcgcataagttgggaacttggaagcctctgttcgatcgagcgcccgtttgcggggcgggaagggatggcgtctggggattctccgttcttcgcgccgccgggctccggcttccggtatcctgaacgttcgcgacaattccggattacgagagcagcggagaggcttcatgaagatcaaccacgcgatcctgcacgttttcgacttcgtctcgtgcgtcaacgtgtacgcccaggaggagctcgatctttcgagcaagaacgccaagcgctacgtgacgagccacgcgaagaaggcgctcggcaacatcgacagcaagcgcggcgagttcgccgagaacagcatgttcgccgaggagctgcgctgctacttccgcggtcagcgcgagttcgtcgacctgtccgtccaggtggccgagttcatcgccggcgagctggggcgcatggagaagaccgagtcggccgaccttctggtgatggacttcgaggacgatcccgacaacacggtgcgggagatgaccgacgacgaggccgaggcggcgtatcgcggcgagggcaagcgctacttcgcgttcatgctgctggaggccaagcaggcctacatgcacgaggtgggctacggcgagagcggcgcgcagcgcgtggacatcgcgcgccatcacgccatcctgccgaacccgtcgcagaaggtggcgtcgttcgcggtgatcgagtcgaagacgctgtcggtgtcgttttgcgacaaggagcgcgccatcgcgggcgagaaccgctggctcatccccgacggcctgctgcaatgctcgatggaggcgtccagcaaagaggtgttcgacgccgtgacgcgcatcgtcgaggaggttgccgaggagtacggcgccaacgcggctgtggcggtgtcgaaggcgaaggcctacgtggccgagaacgccgacgagtccgacgagcttgccccgtgggacctgggcgaggaggtgttcgaggacgagccgctgcagaagcgcttcgagcaggcgcttgccgacgaggcgctgcccgagcgcgtggtcgtggagaagaacgtggccaagcgcgtggcgaagagccacaagatccgcaccgacacgggcatcgacatcacgttcccggccgagtacggcgagaaccccgacttcatcgagttcgtcagcggcccgaacggcctcatcaacatcgagctcaagaacatcggccacatcgagaaccgctagaggtcccgcggtcccatcctgcaacctgccgccgcgcccgcttccccgcggacgcggtgtatgagacaatagagcgaacttcccggaaaacagaggagcatcacgtggcggaattcatctaccaaatgtatcaggcgcgcaaggcgcacggcgagaaggtcattctcgacgacgtgaccctgtcgttctaccccggcgcgaagatcggcgtcgtgggacccaacggcatgggcaagtcgacgctgctcaagatcatggcgggcctcgaagaggtgtcgaacggcgacgcgcgcctcacgcccggctacacggtgggcatcctgcagcaggagccgcctctggacgacgacaagaccgtcatcgagaacatcgagatggcgttcggcgaggtgaaggccaagatcgaccgcttcaacaagatcggcgaggagatggccgagcccgacgccgacttcgacgcgctcatggccgagatgggcgagctgcaagacgccatcgacgcggcgaacgggtgggatctcgacagccagctgtcgcaggccatggacgcgctgcagtgccccgaccccgacatgccggtgaacgtgctatccggcggcgagcgccgtcgcgtggcgctgtgcaagctgctgctggaggcgcccgacctgctgctgctcgacgagcccaccaaccacctggacgccgagtcggtgctgtggctggagcagttcctgcgcacctaccccggcgcggtgctggccgtcacgcacgaccgctacttcctggacaacgtggccgagtggatctgcgaggtggaccgcggcagcctcttcccgtacaagggcaactactccacctacctcgagacgaaggccgcgcgcctggagggccagggccagcgcgaggagaagctggcgaagcgcctgcgctcggaactggagtgggtgcgatccagccccaaggcgcgccaggccaagagcaaggcccgcatcgagcgctacgagcagatggcggccgaggcacgctcgttcgagaaggccagcgtgtcggacatcaccatccccgtgccgccgcgcctgggcgcgaaggtcatcgaggccaagcacatcaggaaggcgttcggcgaccgcgtgctcatcgacgacttgtcgttcacgctgccccagggcggcatcgtgggcgtgatcggcccgaacggcgtgggcaagtccacgctgttcaaagccatcgtgggcttggagcccctgtcgggcggcgagcttgagatcggcgagtcggtgagcatctcctacgtcgaccagaaccgcgagggcatcgacccgaacaagaagctgtgggaggtcgtctccgacggcctggactacatgaaggtgggcgacaccgagattcccagtcgcgcctacgtggccagcttcggcttcaaggggcccgaccagcagaagccggccggcgtgctgtcgggcggcgagcgcaaccgcctgaacctggcgctgacgctcaagcagggcggcaacctcctgctgctcgacgagcctacgaacgacctcgacgtcgagacgctggaaagcctggaggaggcgctgctggcatttcccggctgcgtcgtggtgaccagccatgaccgctggttcctcgaccgcatcgccacgcacatcctggcgtgggagggcaccgacgagaacccgggcaactggcactggttcgagggcaacttcgacgactaccagaagaaccgcgtcgagcgcctgggcgaggaggccgcgcgtccgcaccgcatccaccgcaagctcacccgcgactagcagatacgcgacatgcattcgaggccccggagctgaacggcatcggggcctcgccgcgttcaggcgaacttgacggcgcaaaggacgacgaacccgatgacgacgacagctgccaaaaggttcatcacgcgcagcgggagcttcccgagggctttctggcacagcgggtagacgatccatgtgtacagcatggccacggccgccagcgcgaggtcgtttacgagccatgcctggccgaggatgttgaacggcagctgcgagttgtcccacaacgggtattcgccggcggcgttcggctggttcagcatgaaccccatggccagttccatgagcatgcacacgaccacggtgacggcgaagaactggatcccggcgctgacgagggtggcgcgccgggcgaccagcgccgtcttgagcggcatcagcacgagcgcgcagacgacgacgcccacgccgtacacgagaaacgggtacatcgggtcgtcccacacaagcgaatcggcatcgacgatgccgaatacgttcatgaacgagcagtagacgatctccatccaatgtcccagcacgctgaacacgcagaagtacacggccaggttccgccagaacgcgaaggagccgggctcgtagccgtaccgctcgtcttctttggagagaatgggcatggacgctgggtcgtcctagccggccgcttcagaatcgtagctggacgagagctcgatcgaggttgcgtccgaggagccggcatcgtcggcgtcgtcgaggtcgggaagcgccacgttcacgtagtacaggaagatcaggatgcagaagccgacggtcacggctatgaaggcgatgttcatgccgtcccgggggaccttgctcagcagctgctcgagcgccgggtagatcacccaggtcatgagcgtggccaccacgccgaaggcgatggcgttctgcagacacacctggcccatgaagttgcagaacatatcggagtagtcccataagggcagcttgccgtcagggccgggctggttgaccatgaggcccatgaccagttcgatggtcgtgcagacgagcgcgttaacgacgaagctgatgagcaagggcaccacgcggctgcggatgcgcttttcaaggaagttcttgacggggtacagcagaagcacgcacgccacggctccgaatccgtacacgatgaaggggtagagccaatccgaccagatctgggagttcgggtcgtaggtgccgggtatcattccgaagcggatgagcgtgcaataggccgcctccatccagtgtcccaccacgctgaacacgcagaagtaaatgatgatgttgcgccagaacgcccaggtccgaggctggtagcagtccaggtccttcgcgagctcgcgttgtttgacctctgcgtcgaagggctgcgtcagcacggctttcgcgcgtctcgacgtgaggaagtacgcgagcagtataaggtcgggcgtgcacgagaacagctggccgacaaggctgaagtgaccggtcgcgatgttgaaggcggttccgatgaagatgttgaacaagctgaacccgatgatgaaatggcgcgccaggcgtttgcgctgccagatgagccagaagctgatgctgtcgaatatcaggttgacgaaatcgaggatgttcgagaattccagctcgtagctgcctttgatcaggaacgccaacagcgagatggtgacgatgacgttgaatgcaaagaagaactggaggacccgcatgaagccgagcttcttcgggttgctgaagtctttcgccatgggctgcggctccaatcacgctcgacggatctatgcttgcggcgcgcgtccccgatggcgttgcgcgcacagttcgtccagtatatctcggcagaccggcggaaggcgcgttcggaaaggcagatgccgcgttcgcttcgcagaacgcagcgttcgtgccgctaccagcgtttgagcgtggggagcagggcgcccatgaacgaaacggcttcgtcgcgcgtgatgtggcacgactcggccatgaatggggcgcagcgctcgatcagctcctcgagcgtctcgtcttccagaaacgcgccgttcgcatagcaccacgagcagtagtcggccgacagagagccgtccgcctcggtgccatgatccttctcctggtagaacggcatgccgcagctttggcagtaggcgccgtcgggcatctccaaaagcagggcgacgggcacatcgcaggtggcggcgatgagcttgcacatgtcgatgccaggcgtggtctccccgttctcccagcgcgatacggcctggcgggtgacgtaaagcttgcgcgctaggtcttcctgagtgaggttgcgctccttgcggatgcggacgagcacgtctccgatggccatgggggtcctttcgtcgttggcttgcgcaaccattgaaccacggcgtcggccccgccgtaaagaaacaaagcgttgcgggatgcgctgcgcggcggttgcgggtatgatggcatggcgttgctgcaagcctgttgcgagatgccgcgtgcgcggccgaagggagacgacacgatgtacatcacctgcctggacctggaaggcgtgctggtgcccgagatctggatcgcgttcgccgaggagagcggcattccggagctgacgcgcacgactcgtgacgagcccgactacggcaagctcatggacttccgtctggacatcctgcgccagcatggcctgggcctcaaggagatccaggagaccatcgcgcgcatcgaccccttgccgggggcgaaggacttcctcgacgagctgcgcgccacgacccaggccgtcatcatcagcgacacgttcacccagttcgcccagcccctcatggcgaagctgggctggccggcgctgttctgcaacgagctggaggtggctgacgacggcaccatcgcgggctttcgcatgcgctgccccgaatcgaagctgaccaccgtgcgcgcgctgcagtcctgcggcttcgacaccatcgcggcgggcgacagccacaacgacctggggatgatcagagccagcaaggcgggcttcctgttccgcagccccgattccatcaaggccgagaacaccgatctgcccgcgttcgaggaatacgacgacctgctcgccgccgtcaagcaggctatggcttaactgcgttcgccgtcgcctgcggcatcggcgttttcgcgcaggtgctcgtcggcggcggcgcgcagcgtcgccacgacgttcgacgaagcgctcgtggcgacgcccgagctcagtatggcctggagcgggttcgcgtggtcgccgcggcaggcttcgtcgctcatgatctcgacgaggccgcccaaggtgaacctcactaccaccatggcttcgctgctcaaacgcgtttcatcgacatggaacaggtcgaaccaggtatgcatgaccaggttcttcagcgtggccacaagctcgctcgatccgttcttgccgacgaccagaagggcacggtcgatccgctttttcaggtcggggttgcgcagcaaggcgttcgcctcgatctcgtcgatgcctttcgaaggccctccgttcatcagcaacatgcgcgccatctcgcgcgggagcatgctgtccagcgcctgcgcggcgagcgcgcccaagccgtcgaaatggtagtagaacgcgttcttgttgacctgcgcccgcttggcgatctcgccgacggtgatctgggcgtacggtttctcggcgaggatctcccagaacgcctcctccatgcgctcgacggcggtggggccttcctggtctttacgcgggcgcgccatggcttctcctcgaaactagtcagcaggaacaatattcaccatttttattagacgttgcgaccaataaaattgcctcttgagaataaatcaagccgcgggcgcggtcaagcgccggcgacgcattcggaaggaggctcccggtgttcgagaaactcgggaaagcgaagtacgtagtgccgctgctcatcggcatcgtggcggcatgcgtcatgtccgtcatgttctacccgatggcgaacatggagatgaaggggctgccgttcgcggttctgtcgctcgacgagggcgtggagacgccgcagggcgatatgaacgtgggcgacaccctggtcgagaacatcacgtccgcgacggctgcggagggcggcgaggagtcgcccatcgcctggacgaaggtgggcagccagaaagagctggacgaagctctcgagaacggcgaatactacggcgcgatcatcgttcccgctgatttcagcgcccagcagatggcggtcaagcaggctgagacgaaggcctcgctcgcgcaagcccaggctttgatggccgcgcaggcgcaggcccaggccgctgcggcggcccaagcagccgcagccggcggcgaagctgccggaggtggcgaccaggctgcggccatggctgctgccgccgcaggcggggaggctgcgggtggcgaccaggctgccgcgatggctgccgccgctgcggcgcagggaggggatgcggcggcggccgcgcagggcgatgcggctcaggccgctgctttggccgccgccgcgcaagacgacggggcttccgaggctgaggaagtggaggctccggctctcaaggtgctcatcgacaaggcgaagagcccgctcgtggccagccagatgggcgcgagcatcccctcgatgttccagcagatgggcgtcgacgtggacgtggagaccattcacgaagggtcggcttccgatggcgacggagcggcggccaatcccatgtccggcatggtgtcgctgcagcttgccatcatgccgctgttcatggtgtcgatgatgacgggtctgttcctcagccgcatcttaggaaagaagacggatgcgacgagcgcggagcgctggaagtccatcgggatccaggcggcttacgccgtcgtggcctcgctgatcgtcagcctgtgcgcgttctgcatgctgctgtggatcgccggtatcgaggctcccatggacgccatcgtgccgttcatgtggcttgccagcttctgcgtgatgctcgtgttcatcggcgcgttcaacatctccacggcgcttggcggcctgcttgcgctcgtcgggttcgcgttgggcatgatgacgggcacgttccccttcgaggctctgccggcgttctggcaggattgggtgtacccgtgggccccgcagcgcttcatgagcgagggcatccgcgccatcctgtatctggacgcgggcgcctggaacgcagggagcctgccgctcctgatcgtgggcgcggtcggcgcggtgctgacctgcatcgccgctctcgtgccgggcaagaaggacaagagcgagacggtcgccgcctaggcggagaaaccgcttggcgttgcacgtggggggcgggcttcggctcgcccctttccttttgtcgcgcgattcgcgcccaacctcgccctttcgctgcacgcaaggcgtcgaaaccgtgcgttcgcggcgaagaaggctgggcgacggcttcaggtgacggttctggcgcgttgggaaccagaaggcggcgcacgtcggtgcgtgtcatccctcctttgcgcgcgcctccgccatgtcgaagcgatcctttcaggcgcatactcggctcgcagcgcagcctttccgctttcgtaaggaatggacgtgaagtgcagaatcatcgaccggctctatcctcgtggtagtatgttccgactttcgatatacgacgttcgaggagaaagacgtgccatacaaggtgaacgagccggtggaaccgcaacaaagggcggtcatcgatgatgaccagctgaaacggatgatggcggacagccagccgagcttcttcgagcgcaaccgttatcggctggtcacgctcgcgctcatcgcgatcaacgtcgccgtgttcgcgctcgaggcggtgctgtccggcatgcgcatcgacatttccacgcgcaccctcgtggacatgggcgcgatgtacgcgccgcttgtccagtcgccggccgacctgtaccgtttcgtcacgccgatgttccttcatatggacctcatgcacctcggtttcaacatggtggcgctgtacagcgtgggcgaggtgttggagcgcacgctgggtcggggcaactaccttgcgctgtacttcatcgcgggaataacgggcaatgcggtgtcctatgcggccgatgtgctgctcggcggcggctccgcggtgagcgccggagcttcgaccagcgtgttcggcctgttcgtggccgtggcgctgttagccgtgctgcataaggggaaccgttcgctcttcacgcagtacagcaagggcatgttgggggtcatcgccgtgaacgtggcgtacacgctgctcgtgccgaacatctccgtgagcgggcatctgggaggggcgcttggcgggctcgtcgccatgttcatgattccggcagccagcctgcgcgtgccgaatcccgtgcgcgtcgtcgtggccgtgctgtgggtggcggcgctcgtgtggctgctcgtttcgcaaggggtgctcggtgtctagcgggcggcgcgcagtcgcgctgcggccgggtcagctgctggccgtgggcggcatgctgttctcgatgttcttcggtgcgggcaacctcatcctgcccccgcttctgggattgcaggcgggtgatcaggcgatccccgccatgacgggtttcttgatcgcgggtatcggcttgccggtgctcggcatcgtggcggtggccgtgtgcggcggcgtacgcgagctggccgggcgcgtgagcccgctgttcgcctcggtgttcatcgcgctcatgtacctgaccatcgggccgtttctcgccattccgcgcacgtcttcgaccgccttcgagatgctaaggcccctgctgcccgtaaccgatgcggccggcctgggcgtcgcaacggcggcgttctccgtcgcgttcttcggcgtggcgttcgcgctggcgctgcgacccgggctgttgtcgcgcgtgctggggcgtttctctgcgcccgccctcatcttgctcatcgtgctggtggtcggcgcctccgtgctgggcggcgcgcccgcgccgacggctccgcagccgccctatgacgcgagcccgctgtcgaacggttttctcacggggtaccagaccatggacttgctgccggcgctgtgcttcggcatcgtggtggctgcgaacgttcgcgagctgggcgtgagcgacccgaagcgcgtggcgggctccatttcgggcgcgggcctcatcgccggagcgctcatgatggccatctactgcgggctggcgttcgtgggctcggcgatgggctcgacgatgcccgacgcggccaacggcgcttccatcctcgcggcgtcggccagcgcgcatttcggcccggcgggtacggtcatcgtggcggccatcttcctgctggcctgcctcaacgtatgcacggggctcatctcgtgctgctcggagtacttctccgaggcttttccgcgtatcccgcttccggcgtgggcggcggcgttcgccgcgttcagctgcgcggtgtcgctcgtggggctcgatgccatcctcgcgttttccgcaccgcttctgggcgcgctctatccgccggccatcgtgctggtggtcatgggcctcgcgcacgggcgctgcgaccggctgccgcgcatgtggccctgcgccgtgctggcgacggcggcgttcagcgtggccgtgggcctgcgcgacgcgttcgcgccgggcgcgtggctgcccctcgatgcgcttccgcttgccgacgcgggcctcggatggattgcggtcgccattgcgggcgcggcggcgggcgcaatgtggtcgctcgctgagcgcaggcggcgcacgcgacgggcgtgagcgcccgactccggattcgtggcggttttccctacagccccaggcccttcgccacgttggcgatgaagtcctggacgttcgtcacgatgccgcgcgaggccagagagccgcggtcgatgagcttgttcaccgcgaactcggcgatgtccacgcagtagaagtacacctggcgcacggtgccgtccgcgagcacgcggtacgatggcgtcatgttgcccgtggcgatggtgtgcagcatggtggccatgcacacgaccgtggtggctttgcgcaggtgggagcgcatggcgtcctgcgcatcgtaggcgttgcccagcacgcacggaagcgggccgtcgtcgcggatggagccggccagcacgtagggcacgcccttcttctccagcgcgtgcatgatgccgcccgacacctgctcctcctcgatgaaccggccgatggagccgtacagccgcacgcggttgatggtgtccaggtggttgtagtggccgagcgggcggttctcctgcgtctcgatgtcctggccgagcgccgtgtggaagtaagagccctccagatcgtgcgtggccagcgcgtttccggcgaacaccgcgtcgacgtagcccgcctcgatgatcttggagaacgccgtgcgcgagaagccgttgaacgagaacgccggccccatcacccacacgacgtagccgtgttcgcgctcgtgcttcagcagctcgtagagctcgtcgtactcgcgggagaacgccgtctcgcgcgagcgccccaagcggaaggcgaagttgtcggcgtggcgccctgcgtcggccagctcgccttcgccgtccggcgcggggtcgaacccggtcgtgtggacgtagatgccctgctctcccgactcggtgcgcccgcacacgatggcatctcccgcgcggatgtggcggaactcgcgcacgaagatgcgtccgtcctcgcagacgggaacgcagtccatgcggctgtcttccgcgagcagccatgcgccgtcgatcttgaagtactcggggtagatgctcatcgcgtggtagccttctggcgccacgccgtctttcggcgccggcagcagcacggcgtcgggcgcgccggccagcggctcgcggtggaagtcgggagcggtgtaggggttcaatgcgaagctcatgggctgccttctctccaaggccggctgaggacgtccggctgctttcgttcgcatgcgattatacacggcgacgaggcgaaggcttcggaggactcgcccgcatcgcgggcttcgcgcgccggcgagtctacagcagcttggccagcttgtcgatggccgcgttgcacgagtgcccctgcaccaagccgaccttcgcggtgaaggctgtgagctcgatgcgcgcgccgccgcccgtggacacgagttcggcgacgacgacggcggggttcgcgacgatgcccttgttgaagtaggcgacgtaggggttgcccgtcggagcctcgtgcagcgtgatcaggcttttgcggatctgcgccgccgcgttgcgcagcctgtcgtaggcttcgttgccggagcggcccagctccacgacgcgcgtctcggtgcgcagcttggccatcttggcgtacgctgccgaggagtcgcccatgccgattccgcccacgacggcttccagcgcatctccgctcatgatgccgtcgagcacggccaacgggttcgctccggctttcgcctggcctttcgccaggatgttcctgatctcgttcgtcgcttgcatgggcggctcctctcctcgcgttccgaatgcgcccatcatagctggaggatccacaccgaaaggacaccaaagacgcagccgcgatctgccatcccgagcgagcgaagcgtcctgcagcgcggcgtgttcttttcccgttcgcggccgtccgaaggcggcggttgcgggtagaatggaaccttatcgtcatccctgatttccggaggtcgttcccgcatggtcgagcgcgcagcagaagaaacgtcggaacccgaggacgcggctttcgcgcacgggtcgctggggcggctcgcgcccgcgtggtgggagcctgccgagggtgagccggagcccgagccgtggttgacgcccgatgcggcgctcgaccgcttcctcgactggacggcggcgcgcggcatagagctctggccccatcaggaggaggcgctcatggacctcatggtgggcgaccatgtgatcctaggaacgcccacggggtcgggaaagtcgctggtggcgctggggatgcagttcatggcgctggcaacggggaggcgctcgtactacacggcgcccatcaaggcgctggtcagcgagaagttcttcgatctcgtggaggtgctgggacgcgagaacgtgggtatgatcacgggcgacgcgcacatcaacgccgaggcgcccgtcatctgctgcacggccgagatcctggcgaaccaggcgctgcgcgagggcgaggacgccgacgtgggctgcgtggccatggacgagttccacttctacggcgacgccgaccgcggctgggcgtggcaggtaccgctgctgacgcttccgaaaacgcagttcctgctgatgagcgccacgttgggcgacgtgggcgccatcgcggctcgcctcaagagccaaaccgggaccgacgtggacgtggtagccgacgccccgcgtcccgtgccgctgtcctacgagtacgtggagatgccgctggagggcacggtggagctggccctgcgcaaaggcgaggcgccgctgtacctcgtgcatttcgcgcaggacgcggcgctgtccaccgcgcaggctctgtcgagcttcggcgtggcatccaaggagcagcgcgagctcatcaaggaggccgtcaagggaacccggttcaccacggcgttcggcaagacgctcaagcgtctgctggccagcggcgtgggcgtgcaccacgcgggcatgctgccgcgctaccggctgctggtggagaagctggcccagcaaggccttctgcccgtcatctgcggcaccgacacgctgggcgtgggcatcaatgtgcccatccataccgtggtgctcacgcagctcacgaagttcgacggctacaagatgcgccgcctgcgcgcccgcgagttccatcagatcgtcgggcgggcgggaaggtccggcttcgacaccgagggcatggtggtggcgctggcgcccgagcacgacatcgagaacgcgaagcttctggcgaaggcgggcgacgacccgaagaagatccgcaagatcaagaagaagcagccgcccgagggcttcgtcacgtggaacaagcagaccttcgaacgcctgatagaagcggtgcccgagacgctgaagccgcgcatgaagatcacccattccatggtgctgtccgaggtcgtgcagggcggcgacgcgtacggccgcgtgcgcaagctcatcgacgactcggctcagaccgacgaggagaagcgggcgctcgtcgtgcgcgccgacgagatattcgacacgctgaccagcgccgacgtcatcgagcaggtggagggcgaagggggcgtcgtcgagtacgcgtgcacggtggacctgccggaggacttcgcgctcgaccagccgctgtcgccgtttctgctggcggcgctggagcttttggacccggagagcgactcgttcgccctcgacgtcatctccatggccgaggcaacgctggagaacccgcgccaggtgctgcgtgcgcaggagcgcgccgcgcgcgacaaggccatgcaggacatgaaggccgacggcatcgagtacgaggagcgcctggagcgcctcgccgagatcacgtacccgcgcccgctcgaggagctgttggacgcggcgttcgagcgctactgccgggaggtgccgtgggcgcgcgacttccagctggagccgaagtcggttctgcgcgacatgctggagagcgcgtcggacttcaagggctacgtgcagcgctacggcatcgcgcgctcggaggggacgcttctgcgctacctgtccgacgcctaccgcgtgctcgatcgcacggtgccggcggacaagcgcgacgagcggttggcggacgtcatcgcgtggctcggcttcgtggtgcgctcggtggactcgagcctcgtggacgagtgggagagcgcgggcgcggccgtggacgtcgcgccgccgaaggcgggcgacgtcgtggtgcacgaccgtcgcggcctgaccgtgctcgtgcgcaacgcgctgttccagcgcgtgcggctggcctcgcagggacgtgtggccgagctgggcaggctcgatgcggaatggggctgcggcgagccgcgctggcagcgcgccctcgacgcgtacttcgaggcgcacgggcagatcgccatcgacgccgacgcgcgctccgcagccttcctttccatcgacgaagccgacgagcaggccgagcacgtgtggcatgtgcgccagatattcagcgaccccgagggcgaccacgatttcgccatccaggccgacgtcgacctcgacgctacccaggaagagggcgaggccgtgttcaaaaacttccgcgtgggcttcttcgaggagctgggcgaatgaaggcgcgtcgatagatgcctctggatgagcgcgatttccctgcagggctccggaacgggcccggaacggttgttccgggcccgttccgcgtcttagagcgatcggtttccgcaggacggatccttttttcgaaaaacattccatactggtgaacctcgaggcttctcggcgctactaaggggttgaaggcgatcggcagcgacaagacggaaaggcggtggcatgggcgagcaggatgcggacgatgcgctggcgcgctcggcgctcgtgcggatcgcgcgcggggacgaaggcgcgttggaggaattgcatagcctgtacgcgtccgccgtgttcgcattcgtctcggcgcgcctgggcgaccgcggggcggccgaagaggcggcggtggacgtatggctgggatgctggcgctcggccgcggcgttccggggcgacagccgggtgctcacgtggctgctgggcatcgcaaagcgccaggcgtgcatgcgcatgcggcggatccggccggaggagcttccgctcgacgaggacttgacgcagctggccgacgaagctggcgacccgtcggacgcgctcatggcgcaggcgggagtcggcgagatcatggccgccttggacgcgcttccggccgcgttggccgagacggtgcggcttgcctggctgcacgagcttccgtacgcggagatcgcgcaggtgaccgacgtgccggtgggcacggtgaagtcgcgcgtgtcccgtgcgcgtgcgctgatgcaggagacgttgggaggtcggctatgagcttgagggaagaacggccggacgtggcgagcgccactatgaaacaggcgctgagccgacaggagcgggaatgcgccgctggcgcgccttcgttcgcgcgtatcgcggcgcgcatcgcggccgaaccgtcggctttcgaggctcccgcctggtcggtgcgcaagagcgcgcgcctcgcggccgatctggcggttgcgcaggcgcgcgtggtgccgcgcgcggtgttgcctgcggctctgatcatagccgcggcggctgcgggcgcggcgtgcttcgcggtgtctgccggcgcggcgggcgcggctccctggtggttctcgacgcttctgctgctgggcgtggcgatcaccgtgacggcagcgctctcgaccgacgcggccgacgcgttggcgctggccatgcccctggggccgcaaacggtgctgctcgctcgcttgacgacggtgctgggcgtcgatgcgctcgcgggccttgcggcttcggcggcgttcgcctggtggggcgcgccgctcggcttcggcgccgtggtgctgtcgtggctggcgccgctggccgtcgtcgcgggcgtctcggctttcgtctccgtgtggaccggctctccatgggctgcgggcgtcgcgggcgctgcggcagcggccttggcggcgccggtcgggcgcgctgcggccgacggagggatggcggcggcgctggccgggttgcagagcgcgatcgggcccgaggtcgtgttggccgcgggctgcgccttgctggcggcggcggtggccacggcgcgacgggcgacgatcgcccgcttggagtcggcatgatgctcggtgggcgagagacgtattctaggaggtttcgcatgggtgcttcggatagggccgctcgcggcggctcggcatcaggcgcatggtgggcgctgttggacgcgcaggcgcggcgcgtcagggtcgtggggatcgcggtgccgctcgcgacggcggtgctgatcgcgatcgcgggttcgtgctgggcgctggcggcgggaccggcgtcggccgcgctcgccatgctggggatcatgccgctctacgccgccgccgcgggcatgtgcgccgcggccgtgttcacgggcgacacgctcgtggagctgcatgcgtcgacgccgatggagttccgcacggtgcagaccatgcgcgcggccgtgctgctggtcgcggcggctgtcggaggcttcgcgctgttcgcgtcgttgcatctcgcaggtgcgatctacggcgacgccggctgggtcggcgcgctttcgccggcgggcggggcagctctcatggtgttggtcgcgtatgcggcggcgctttccgggtcgacgcgtgcgacgacgctcgtcgtgatgctcgtctggctgttcttcgcgttgatatgggatccgaacacggcgtcgatgccggcgctgcagcgcgggttgccgttgctcgtgctgctcgccgtcggcgcgtgcgcatggcatgccctgggctcgcccgagcgcgtgtggaggaagctgggaggtgcgcgatgaggttcttgtcgttgtcggtgatccatgcgcgcatggctgcccggcagcgtgcgatatgggttgcgtcgctgctgctggcgctgctgtcgatgggggtcacggtgaataccgggcttcctttcgagacgggagacgtcgccgacctcgtgttcttggcgcagatgctggccatgctgccgcccgtcgcctacgctgccgctttcaccgaccttgccgccgagcccgagcggctgggcatctcggaagtcgaggcctccgcccccgtaaggccgatggagctgacggtcgcacgcgttgcgggcgctctggccgtgatgacatcgccttcggccgccttgttgctgttctgtgcggccgggcagatgctgcacggcaacgtttgggctccgttgcaggcgatagtcctgttcgccggggtggtgcttcccgctgcctttgttgctgcggcgctgtcggcgctggcgggctcgttactgccgaggatcgtcgcgcgcatcgtctccgtcgccgcatggctgggtacgctgttcgcatgttcgttcaagggcgttccggcttccggcggcggcgtgcagttccatatcgcgagcgacccgctcgcgcaggcgttcttcggatcccagccgttcctcgactatcaggggccggctcccgccgctgcgcctttcgaagcgctggccctgctcgtgttcaagttcgccgttgcggcggcgcttctggccgcggccgcggccgtcgcccgcaggcgctcgtaccgccgtcactgacgagcctccgctccgcatagaaaggactcccatgttcatctccctcgaccgcctgggcaaggacttcgacaagaggccctgcgccctcgacgacctcacgctcgacctgccctcgggcatgatcgggctcatcggccccaacggcgccggcaagaccacgctcatgcgcatcctgtgtggcatcgtgagccccacccgcgggcacgtgctggttgacggccgcgatatcgccgagccgcgcaaccgccgcgcgctcaagaagaccctcggatacctgccgcaggacatcgagccctatccgaacctcacgccgccggagttcctcgactacgtgggcatcctcaagggtatggacgacaagcgcgagcgccgccgccaggccgacgagcttatcgagcgcgtggggctggcagatgttcgccgccggcgcatcggcggtttctcgggcggcatgcggcggcgcgtgggcatcgcgcaggcgctcatgggcgacccgcgcctgctcgtggtggacgagcccacggccgggctcgaccccgaggagcgcatgcgattccgcacgctcatcgccacgctgggagccgaccgcacggtgatcctgtccacccatatcctcgacgacgtggcgcagacctgcccttacgtgtgcgttctgcgatcgggccgactgcgctacgacggcgcaacggcgggcctcatcgacggcgcgcacggacgcacgtggctcacgccgccgctcatggcgccgccgacgggcgcggtcgtggtgaacgcagccaccacggcgcagggcacacgctaccgcatcgtgagcgccgcgccgcccgcggggtcgcagcccgtcgagcccaccctcgaagacggctacatggcgctggcctccgacgatcgggcgagggcctgatgtagtgctgctgcggcgaagaggcctcctttttggcgttgcgctggaaatcgctttcccgcgcgtcgtgcgcccgcttcgacgggtatcatgtgcgggtacgggaaaacgggggagagacggccctttggacacggaaaggttgactatggcgaaaatagcgatgaccacgccgctcgtggagatggacggcgacgagatgacgcgcatcatctggcagatgatcaaggacgagctgctgcttccgcatatcgatctgaagaccgagtactacgacctgggcctggagcatcgcaacgccaccgacgaccaggtgaccgtcgattccgccgaggcgaccaagcgcctgggcgtggccgtgaagtgcgccaccatcacgccgaacgccgcgcgcatggacgagtacgacctcaagagcatgtggaagagccctaacggcaccatccgcgccatgctggacggcaccgtgttccgcacgcccatcaccgtcgcgggcatcgagccgtgcgtgcgcaactgggtcaagcccatcaccatcgcgcgtcacgcctacggcgacgtgtacaagaacgcggagctgcgcgttcccggtcccggcacggtggagctcgtgtacaccgccgcagacggctccgagacgcgcgagctggtgcagaagttcgacggccccggcatcgcccagggcatgcacaacctcgacgcgtccatcgagagcttcgcccgcagctgcttcgagtacgccctcgacatcaagcaggacatctggttcgccacgaaggacaccatctcgaaaaagtacgatcaccgcttcaaggacatcttccaggatatctacgacgccgagtacgccgcgcgcttcgaggaagccgggatcgagtacttctacacgctcatcgacgatgccgtggcgcgcgtgatgaaggccgacggcggcttcatctgggcctgcaagaactacgacggcgacgtgatgagcgacatggtgtcgagcgccttcggctcgcttgccatgatgacgtcggtgctggtgagccctcagggctactacgagtacgaggccgcgcacggcaccgtgcagcgccactactacaagcacctcaagggcgaggagacctccacgaactcggtggccaccatcttcgcgtggtcgggtgcgctgcgcaagcgcggcgagctggacggcttggacgacctcgtggcgttcgccgacaagctggagcgcgccacgctcgacaccatcgaggccggcgagatgacgggcgacctcgcgctcatcaccacgctgccgaacccgaagaagctgagcacccgcgacttcatcctggccatcgcgaaacgcttggaggcgtagggcggaaaaggacgcttgcgtatcgcacaaggtctcttcctgcggccccgacgacacgtcggggccgcttccgttttcggacgcgacgccggtgcaagggggttcgccgtgcacggcgcagccggcgcgcatgtgggcagggtgcatacccccgacggctcgacagcgcaagctcgatgcccgattctggtaggaatcgacgggattccgtcgcgagggagcgccggctggcttatcttgtgcaagcatgaaatggtcgtcctgggaaaacgggagagcgctcccatcattgggtctctgtgccgggttaggcgctccttcaacgacggaatcccgtcgattcctgtcgaaacgttgcgatcctgccgctcgcctcgcttcagcgaagaagctctgagcggagggcgagctgcctgttcgggtaatcggggcagttcgggcgtattctcgtccctaggtgcttcgcaagaatgcgtgcgaatcgattgtattctttatagttcgtcacatgccgccaggttgcggttaccaccgtgaggccgagggattccagcgcgtttctccgcgaggcgtcgttggcgatgcgttcggcgccggtgtggcacagagtgctgtcatattcgacggccacaccctgatcgcgccaaaggagatcgcatcggaacgaggagcgatcggtggcccagcggttgcttgagctgatagggatgacggcgttcatctcggggttttcgatgccgcttcctccacgatggcaggggagcgtgatcagctcggccagcgtcgattctcgcggggaggccgacatgcccaagatgtagggaagcgctgatcgcgcccgtttcgcgcctttcatgcgttcggccttgttcagatacgaggccaatttagccggcgtagtgagaggctttcggtctctgaccccgtacggcttgctctcgtccggggcgaaggttccgcatagctcgtatccgaggtgaaccgtgcggggaaagctcaacaaggacgccatatggacgaaagtcagttcggggcttgtcgtaagaagcggttcgtcgctgccgggaatcacgatctgacgcagcgatccgtcgggcaggtcttttgcttggtggacgacgagaatgtccgacgctttcctctggcttccgtgcgcgagcaggtgcacggggaaagacgaagcgccgctctgtgcaagcggatgggattgtaccgccaacgcgtgcggcgcgcgatcgggaaggatccgggctcggcatgccatacgcgccgagccctcgtcgctgagggcggagcgccagaaatcgagagccgatatgtaagcgagcacgatgcgcatggcgcgagtgtaacacggagttataccagatgatacaactattttcgggcgtggcaaccgcgttggaacggcacaagatccgcatgcgatccgtgctggatcgaggagcgacgcgcgtggaatcggcattgggtcgagaggtgacgcgcgtggaaacggcgttggattcgcatgaaaaactggtatcgtttgcgggtgccgaggagccgacggccaggcgcgcgatggatcatgtcgaaattggcaggaatcgacaggattccgtcgctggagaagcgcctgtcccaatgtggagatgacgcgatgagagcgtgtcgatgttttcccaggtcaacggttttcaagcaaacaagattaaacggccgaggccccacgcgacggaatcacgtcgattcctgccagaatcggacgtcgggcttgcgcagccaagtcatcgaagcgcgcaagcctgcgggccatggggcgtgatgcctgtggctgcgggtcatggagccagagcccgctcggtcatgggtcgttggtcgtaccgcgcacttgcgagccccatgattccagcgtatcgcggctctagacgcacctgtggggttgccatgccggttgcgccgcagacgggaggctcgccggttgcctgctcgacatcgcacgccttggcgttctttgtcgaacgcgtcctcggccgcacgtggcgcggcgtgcgattgacggaaggggttggatcgtcaatcggggctgacggagcgtcaacggaggaggtattattgtccgggttgttttggacgggcgatgagaggggttcggcagacgatgggtaacgttctgcgcgtattcaagcgcgatgtgctgcgcctgctcaaggcgccctgcgcgctggtggtggtaatcgcgctgctcgtgctgccttcagtgtatacctggtacaacgtggtcggcttctggaacccctacgacaacacgggcaacttgcgcgtgtgcgtggtgaacgaggacgcgggcgcttccagcgagctgaccggcgagctgcacgtgggcgatatgatcgtggaggagctgcgcgaaaacgagcagctcgactgggcgttcgtcgaccgcgccaccgccatggacgagctcgatgcgggcgcgagctacgctgcgttcgtcatacccgaagacttcaccgagcggctgctgtcgctgaccaccggcgacttcgtgcagcccgagctggcctactacgtgaacgagaagacgggacccgtggcgccgaagatcaccgacacgggcgcgagcacccttgacgagacgatcaactccaccttcgtctctacggtgagcgatgtggccgtgggcgcggtcgaccgagcgttggcggagtcgaacgacgcgctggacgcatcgaaggcgagggcggcggtcaaagtggcgggcgcggtgcaggcgatatccgaggcgcgcgccacgcttgacgggatcgtcgcggccaccgacgaagctcaggccaaggcagccggctccaaagattcgctcggacgagcgcgcgaggacatcgccgcggcaggcgacgccctcgcggccatcgcgaacctgacctcccagctgcagggcgaggccgcggagatttcctcggcggcgatgcccgccgtgaacaagacgatccgcacggtgtcggaagcgtcctcgaaagcgaacggcgccgtcggcagcatgaccgcggcggcgggcgaggcgcaggcgggcatcggcgcgaccatcgcgcagggccgcgccgccgccgaggagagcaaggcgctggccgcccaggtgcgccaggcggctcaggcgctgcccgacggcgacgcggccaaagagccgctcgtcgcggtcgccgatgcgctcgaccagcgtgcggccgacgcgcaggcgacgctcgacgctctcgacgcggcgaacacgcaagcgggcgatctcgcgcgcgcggtgtcccaagcgggaacgtccttcgacggatcggtgcagggcgcggccgatgccgcgggggcgtacgcggacggcctgttcggcgatacggttcccaccgtcaaccgaagcctcgcgcagatgagcgcggtttcgtcttcgctcgcggccgccgtgtcgaaccaacgtctgctgatcgaccagaccgagttggcgatcggccagttgacctccacgctcgtcgccgcgcgcgaggcgctcggccagaccggcggcatccttgccgatttggaggaaagcctgtccaccgtgcagaccgacgtgctgtcgctcggcgaatcgggagcgctcgcgaaggcgttcggcaaggacggcctcgacgcggccaaaatcgccgacttcatgggctcgcccaccgaactggtcaccgagcagctgtacgagctgaacgcgtacggttcggccatggccccgctgttcatgaacctcacgttctggatcggcgcgttcatgctgctggtcatcatgaagcaggaagtggacggcgaaggcgtgcgcaagctcaccgtcacgcagcgctacctggggcgcttcctgctgctggccgcgatggcggtgctgcaggcggcgatctgctgcgccggcgtgctggccatcggggtgcaggcggcgaacgctcccgcgctcttcttcgccgccatcgtggcctccctttcctatctcagcatcatctacgcgctgtcggttaccctgcagcatatcggcaagggcatctgcatcgtgctggtgttcgcgcagatccccggcgcgacgggactgtatcccatcgagatgacctcgagcttcttccaggccgtctacccgttcttccccttcacttacggcatctccgccatgcgcgaggccatcttcggcttctacggatcgcagtacgccgacgccctgggcatgctcgcgctgttcttcgcgctgttcatggcgttcggcatcctcgtgcggccgctcatggcgaacgtcaaccgcatggtggcctgccaggtgcgcgagagcggcatcttcaacggggaggacgtggagatccccgcgcgcccctatcgcgtgtcgcagctgttcagagcgttgtctgacaaagaggagtatcgtgaggagctgcgggcgcgcatggagcgcttcgagcgatggtacccgcgtctcatccgcggtgcgctggccttggggctttcggtgcccgtggtgcttgcggtggtgttcgcgctcacgccggccgagaaggtgcagctgctcacggcgtggctggtttggctcgtcgtggtgttcgtgttcctcgtggtggtggagagcctgcgcgcggggctcgagcgccagatgaggctcgaaggcatgagcgacgaggggctgttggagctgggcggcgcgcgcgaccgcatggtgcgctcgtccgacgacgaggcgtccggcgttccggcgcccgccgcggcctgcgcctccgacgcgcatgaagcgcaggatgcggaagggggcgtcgtccgtgggtaacgtgatccgcatcgtgcgcagcgacttcaagcggctgttcgcgaacgcgatgagcgtgatcatcgtgatcgggctcgtggtgatgccgtcgatcttcgcgtggtacaacgtcatcgcgtgttggaacgtgttcgacaacacgggcaacctgacggtggcggtagcgaacgtcgacgacggctacgagagcgacctcgtgcctttgcgcgtgaacatcggcgagcgggtggtgtcggctctgcgagcaaacgaccagatcgactggacgttcaccaccgaggaggacgcggtggacggcgcgcggtcgggacgctactacgcggccgtggtcatccccgcggggttcagcaaggatatgctgacgttctactccgaggacgtgcagcacgcccgtatcgtctactacgccaatgagaagaagagcgctatcgcgccgaagatcaccgaccaaggtgccgattcggtatcgtaccaggtgaacgaggtgttcgcccagacgttgtcagaagtggcgctgggcatcgccgagtcgatgtccgcctacgccgacgaggcggacgtgggcgggcgcattgcgggcgtgtcggggaaagtgcgcgacatgggagcgcaagccgataggatggcgtcggtgctggagctgtactcgtcgctggccggggcggcgcagacgctcgcgagcgattcgggcgagctggtggccgcggcgcaacgcggggtcgacgacgtcggcgcagcggcggagcagggctcgacgtcggcctccgatctgacggcggccgtgaaggggtcggtcgacgacctcgcggacgcgctcgggggcgctgccgcgcgcttcgacgaggtgtccgtctccgcaggagcgctgttcgacgccgcctcgaccggcgccgggcagggcgcggacgcgctgcgcggccaggccgaagccgtggacgcgcagatcgcgcggtaccgcagcgccgtcgagcagctcgaggggctgcgcggctcgctgccttccgacgcccagcaggcgcttgacgccgtcatcgcgcgcatgggcgcggtcgtctcgctcatggagggcatgcgcgacaacctggacgctgcggcagacaggctggaggcagggaacgccgacgtgcaatcgcaacgtgcggaggtcgagcggctggcggccgaggcgcggcaggcatccgacgacctcgcggcctccttcgacgacgggttgaagccgggcttgcagcagctcgcggacagcgcgggcgtcctcgcggccaacatgggcgacggcctggacggcctgcgctcgtcgggcgccgacctgtccgcgtcggcgggctcggccgccgacgtgctgggcgacgcgcgcgcacgggtggacgaggcggcgcagaagctgcgcggaacggcgcgcgagctggaaacgcttgccaacggtgtggacgaggcgctggtcgcaggcgacgcggacgcgctgcgcgcggtgctgggagccgacgcgcagctcttgtcgaaggcgctcgcggcgccggtgggcatcgagcgcgaagccgtgttcccggctgagaacttcggctcggccatggctccgctgtacacgacgctcgccctgttcatcgggtcgcttctgatcctcgtggtggtgaaaccgacggtttccgaccgcacccgcgagcagctgtccgacccgcagccccgccagctgttcatggggcgcttcggcgtgctggcgttcttgtcgctcgcgcagaccacggtgatgggtctggggaacctgctgttcttgcaggtgcaggtggccgagccgacgctgttcatgctgtgcttctggatagctgggctcgtgttcacgttcctgatatacgcgctggtggcggcgttcgcgaacctcggcaaggccgttgcggtgctgctgctgatcatccaggtgacggggtgcggcgggtcgttcccgctgcagctgctgccgccgttcgtgcaggccctgagcccctggcttcccgccacgcacgtggtgaacgccatgcgggcggccatgttcggcacctacggcgccgacttctggacggagatcgggctgctcctgctgttcctgatccccgcagcgctcgtcggcctcgttctgcggggcccgctctcgaagttcatgacgtggtacgtcgagcaggtggagtcgtccaagctcgtgggatagggcctgcggcttccttgtcaagccccggcggtgcgcccccggggcttgccttcttgtggcataatcatgccgagaaaagagaagggaatcccgcatggcacgaaccggtgctccgtcgacgacgcgtcgcacgctccattacttctggctggtcacccgaaagcacctcgggctgttcgccgcgctcatgaccgcgacgtttctgttcgtggcgctgctttcgtacggcaacccctacgtcatgagcctcgtggtggaccgcgtgagcgcgggctcggtggcgcccgacgaggtgttcgcggtgttcggcccttacatcgccgcgctcatcctcatcaacgtggccggccaggcggccagcaaggtgcaggactacacgatgtaccggctggagatcgccgcgtcctacgacttggccaccatgtcgttcgacgcgctgtcgaaccagtcgatgtcgttccactcaaaccgcttcggcggcacgctggtcagccagacgacgaagttcatgagcgcctaccagctgctgctggaaaccatcacgttcccgtttctgccggtcatctgctcggtggtgttcacctgcgccatcctcgcgccgcgggtgccggtgtacgtggccatcctcatggtgctgctggcggtgtacgcgggcgtgtcgtactacatgtacaagcgcatcctgcacctcaacgagcaggcggccagcgcgcagaaccagctgtcgggcgagctgtccgactcggtggcgaacatcctggcggtgaagacctacgggcgcgaggactacgagcgggggctgttcgaccaggcgaaccgcgaggtggtggcgcgcgactcgaagcgcatgtgggcttcgctgacgcgcggcatcgtgacggcgtgcatcaccatcgccatcatgagcgtggtggccgtgttcatcgcgggcggcaacgcgtggtacggcatcacgcccggcacgctcgtggtgatgttcacctacacctacacggtgacgaaccagttcaacttcatcaacaacgggctgcagcgcttcaaccgcgcgttcggcgatgcgagcggcatgaccgtcatcctcgacgagccgcgcctcgtggacgacaagcccggcgcgccggagctcgaggtgcgcgagggcgccatcgacttcgagggcattgacttctggtacaccgacggcgacgcgtgcacgcacgtgttcgacgacttcgagctgcatatccccgcaggccagcgcgtgggcctcgtgggcacgagcggagcggggaagaccacgctcacgaagctcctgctgcgcttgtccgatatccaggaggggcgcatcctcatcgacggccagaacatcgccgaggcgacgcagcagtcgctgcgccgccagatcgcctacgtgccgcaggaggcgctgctgttccatcgcagcatcgccgagaacatcgcctacgggcggtccgacgccacgatggagcagatccgcgaagcggcgcgccaggcgaacgcgctggagttcatcgagcggctgccgcagggcttcgataccgtcacgggcgagcgcggcgtgaagctgtcgggcgggcagcgccagcgcatcgccatcgcgcgggcgcttctggccgactgcccggtgctcgtgctggacgaggccacgagcgcgctcgactccgaaagcgagcagctggtgcaagacgcgctggccacgctcatgcgcggccgcacgtccatcgtggtggcgcaccgtttgtccaccgtggccagcctcgaccgcattgtggtgctcgacggcggcaaggtggctgaggacggcccgcacgcccagctcatcgagcagggcggggagtacgcgaacctctggagccgccagacgggggcgtatttggaagaggagtgacgctccgcgaagggggcgtccttgcgcgggccgccgcgcgccgtgcgcttcgcgcggtcaacccttcgtcaatgagcgtcctacgcttcgcgcaccagcggcttcccggcagcttcgacgcgctatcgtgtgcgaccgtgaaaacggaaccgaagcgaaagggctggccatgacctctttatgggaagcgactgccgtgcgtccgcgcgagggcgctcggatgctcgaaggcgacgtgcgcgccgacgtgctggtcataggcggcggcatggcgggcgttttgagcgcctacctgctgacgcaggcaggatgccgatgcgtgcttgccgagaaagaccgggcgggtgggagcgttacggcgaacacgacggcgaaggtgaccgcgcagcacggccttgtgtacgacaagctcgtcaagcaggaagggcccgaccgggcgcgccagtacttcgaggcgaaccaggcggcggtcgaggggctgcggcagctcgccgcctccgttccctgcgatttcgaggagcgaacggcgtacgtgtacgccgagcagtccgccgccgccctcgaacgcgagcggaacgcctacgagcggttgggcatcccgcatcacgagctggcgagcgctcccgtgccgctgccgaacaagggtgctctcggcatggagcggcaggcgcagttcaacccgctcaagctgctctacgggctgctcccctccatcgacgtgtacgagcacgccttcgtgaccggcgtcgagggcaacacggcgcgcacggatcgcgggtcgatcaccgccgactacatcgtctacgcgacgcattatccgctggtcaacgtcccgggactctacttcatgaaggagcaccagatgcgctcgtacgtgatcgcgctggaaggggcgccgttgacggacggcatgctcatcagcgacggcggcggcttctccttccgcacgtaccgggacttcctgctggtgggaggcggcgggcaccgcaccggagaggggccgaagccgagcgagggctacgccgaggtccgctcgttcacggatgcggcgtaccctgaggcgcaggagcgctacgcgtgggccacgcaggattgcatgagcctggaccaccggccctacatcggcgtgcatcgtcgcagccgtccgaaccactacgtggcgaccgggttcagcaaatggggcatgaccggctcgtacgtcgccgcgcgcaccataaccgacctcatcgtgaaagggaggagctcggtgcagggcctcttctcgccgcagcgctccatgctgcatgccagcttgttctcgaacctgggcacctcgacggcgaacctggtgaagccgggccgccgatgctcgcacttgggctgctgcctcgcgcacaacgacgtggaggactcatgggactgtccctgccacggctcgcgcttcgccgccgacggcacggtgctggaagggccggcaacgaagccgatctcggtgtgaaagcggcagcggctcctccgatcccgcgacgaacgtgctatactaaacgaacaagtgtgctggttaggtgaggaaggggtcggcgcgatggagcgcacgtacgtgtgcatagatttgaagagcttctacgccagcgtcgaatgcgtcgaccgcgggctggacccgttgacggcgaacctcgtcgtggccgatcccgaccgcacggagaagaccatctgcctggccatcacgccatccatgaaggcgctcggcctgtccagccgttgccgcgtgttcgagatccccgagagcgtggactacgtcatggcgaagccgcgcatgcagcgctacatggaggcgtcggccgacatctactccatctacctgcgcttcgtgtcgcccgaggacgtccatccctattccatcgacgaatgcttcatcgatgcgacgccgtacctgtcgctgtaccggacgagcgcccgggagttcgccgtcatgctcatggaggcggtgctggccgagacgggcgtgcgcgccacggcaggggtcgggccgaacctgttcttggcgaaggtggcgctcgatatcacagcgaagcacgccgaggactgcatcggctttctcgaccaggccgagttcgagcgcactatccagacccaccggcccatcaccgatatctggaacatcggcccgggcgtcgcgaggcgcctggcgaagtacgcggtgtacgacctgcgcggcgtatgcgagatgagcgaggccacgctgtaccgcgagttcggcgtgaacgccgagtacctgatcgaccacgcccacggcgtcgagccgtgcaccatcgccgacatccacgcctacgagccgagcggccattccctgggcaacggccaggtgctgccgtgcgactactcgttcgaggaagcgcgcgacgtgctcaaggagatggtggaccagctggtgctcgacctcgtggagaagcgcctcgtcgccggatcgatatcgctgtacgtggggtacgcgaagggtccgggcgagcgtgcgggcgaatcggacggcgcgttcttcgacggcggccacggcaggcgccccgcaagcggccgccgcggtttctcccacaccggctccacgcgcaggcaggcggatcgcacgaacctctactcgaagctcatgccgcggttcctcgacctgttcgacgagaccacgcgcagagacgcgcccatccgccgcatcaacgtgggcgtcggcggggtgctccccgaggagttcgccacgatggacctgttctcggacgcggaagcggaggctgaggagcatcgcctgcagcaggccgtgctggccgtgaaggggcgcttcgggaagaacgcgcttctgcgtggcaccagcctgaaggagaaggccacggcgcgcgagcgcaacgagcagatcggagggcaccatgcctgagcgccgaccccgcgccgatcgggcgcagcagttcatgcccttcgccgcgctcaaaggctactacgacctcatccgcgagcgcgagcgcgtggtcgagccgaagcgcgagctgaccgacgagcaggcgctcgagctctcgcggaagctctcccagctgaaacggcgtgagatggcgtgcatcgtccactacgacggcgaggcgtacgtcaccgtgcgcggcctggtcagcgacatcgatctcgcggcccgcaccgtcaccgtcgtccgcacccgcatccccttcgacgacatcgcggacatccggacggacgcgtgacgcatcgtcgcccgaaaaacacgctcgaaggccgttttgcgtgtttttcgggcgacgatgcacgtgcgacgaggcgtcaaaggtaccttccggtgatgctctcggggttttcggccacttgctcgggggtgccgacggccacgatgcggccgccggaggcgccgccgccggggccgaggtccaccacgtagtcggcgttggcgatgacgtccaagtcgtgctcgatcacgacgaccgtcgcgccctgctccaccaagtgctcgaacacgcccagcagggtgcgcacgtcgagcgggtgcaggccgatggtgggctcgtcgaacacgaacacggcgtcgtcctgcgcccggcccatctcgctggccagtttcaggcgctgcgcctcgccgcccgacagcgccggcgtggcctcgcccagcgtgaggtagcccaaccccagctcgtgcagcgtgtccagacgggcgcgcgccttcttcaagccggacgcgggcgtgcgcgcctcgtccacggtcatggccatgagctggggcagcgtgcagccgggatcctcgcagccctcggcggggcggtggatgcgcgaggcctccggagcgtagcgcgagcctccgcacacggggcaggtgatgtccacgtcgggcaggaactgcacgtccaggctgatggagcccgtgccgtcgcattcggggcagcgcagcttccccgtgttgtaggagaagtcgcccgctttcagcccggcagccttggcgtcgggcgtgcgcgcgaaggcgcggcgcagctcgtcgtgcaccccggcgtaggtggccacggtggagcgcacgttcgagccgatgggcgtggcgtcgatgaggttcgcccgctcgatgcccgcggcttcgatgcgcttgacgtgggcgggaagcttcgcgccgctcgcgttcgcgacgagcgcggggatgaggctttccagcacgagcgtcgtcttgcccgagccggacacgccggtgacggcggtcaggcgaccgcgcgggatagccacctcgagcggcttcacggtgtgcagcgccccggttgccagctcgatgcttccgtgcgcgaacacgtcggcggcggggacgcgctcgcgcacgcgcacgatctcctcgccggagaggaagccgccgatcaacgaggcggggttcgcctccacctcggcaagcgtcccctgcgcgacgatccgcccgccgtcagcgcccgcgcccggccccatctccacgagccagtcggcggcggccaggatgcgcgtgtcgtggtccaccatggccaccgagttgccgtcggcgagcagatcgcgcatcacctccacgagcccgtcgatgttggagggatgcaggccgatggacggctcgtccagcacgtacagcacgccggtggttcggttgcgcacggcgcgggccagctgcacgcgctggcgctctccggtggacagcgtggagcccgcgcgatcgagcgcgagataacccagccccaaatcgacgaggcggcgcgccgtgtgctggaacgactcgacgatgttgtgcgccatcgggcgcatctcgggcgcgaggccttcgggcacggcgtccgtccaggcgaccagctcgtcgagggtcttcgctgacgcctcggccaggtcgatgcccgcaacctgcgggaggcgcgcctctgcggagagacgcgtgccgtggcagacggggcagacgccctgcttgaggaagcgggccacgcgccccaggcccttctcgtctttcaccttcgccagtgcgttctccacggtgtagacggcgttgtaataggtgaagtccagctcggcgaaggtgtcggtctttttcgccttgtacaggatgtgcttcttctcggcggggccggaaaacacgatgtcgcgctcggcgggcgtcagctggttgaagggcacgtcggtgcgcacgcccatctcgcgcgcgacctgcttcatgaggtcccacatgagcgtgctccagggcgcgacggcgccttcgtcgatggtgagcccctcgtcgggcacgagcgagtccaggtccacggtgcgcacgatgcccgtgccgtcgcactcggggcaggcgccgccgctgttgaatgccaggtcctccgcaccggggccgaagaactccacgccgcagacggggcacgcgatagggcgctcggcggcgacgttcagcgtgggcggcacgcggtggccgttcgggcacacgtggctgccggcgcgcgagaacagcaggcgcaggctgttcagcagctcggtggacgtgccgaaggtgctgcgcacgccaggcacgctgggccgctggtgcagggcgagcgcggcgggcacgtgcagcacctcgtccacggaggcgcggcccgcctgcgtcaggcggcggcgcgtgtaggtggagagcgcttccagatagcgccgcgacccctcggcgtacagcacgcccagggcgagcgacgacttgcccgaccccgacacgcccgcgatgccgacgagccggttcagcgggatgctggcgtcgatgtccttcaggttgtgcacgcgcgctccgcgcacctcgatgcggtcggggccgtgcaggtcgcggcctgcgtcggccgccgtcgcgctctgttgatccatggtgcgcctcttggggttcgtcgggtgtcgtcgccgttttcggctctgcgtttcgtcgaagcgtatggtagcacgagcgcggtcggctcgcgtgccgcggatgcggaggagcgcctcggttggcgacggttcgcagccggttcattacgtcgccgttgaccatcggccctcggaaacatgccggaaaaatgaactttcggttcaagtatggtaaagagttcaagaacctgctttaatgagttcaatttatccggagcgaaattgaacttacggagcgatgatgaccgagaagcaggaaacgttcgccgagcgtctggcccgcgcgatggcagccaaaggctacaagcaggccgatctcatccgcatcgcgggagatcgcggcatgaagcttgggaaaagccaggtcagccaatatgcgaacggcaaaacggtgccccgcaggcccgtgggggaggtgctggccgacgtgctgggcgtgcccgccgcatggctgatggagggcgcgggggaaattgaacctgaaaccgtgtcccgcggcaccgcggacggcgtgagcaggccggcaagcgcatcgcagggcgcagggggagcggcccccgcagccggggcgcacgcggacgcctccgcgacgccgatcatcgaccgtaccgaaccgaggagcgataccatgcgcgagatcaagaagtcgaccaagctggacaacgtactgtacgacgtgcgcgggccggtggtggaggaagccgagcgcatggaggaggccggcgcgcgcatcctgaagctcaacatcggcaacccggcgccgttcgacttccgcgcgcctgaggagatggtgttcgacatgagccgccagctggccgaatgcgagggctactcgtcggcgaagggcctgttctcggcgcgcaaggccatcatgcagtacgcgcagctcaagcacattcagggcgtggacatcgatgacgtgtacaccggcaacggcgtgagcgagctcatcaatctcagcatgctggcgctgctggacaacggcgacgaggtgctggttccttcgcccgactacccgctgtggacggcgtgcgtcacgcttgccggcggcacgccgctgcattacgtgtgcgacgagcaggcggaatggtatcccgatatggacgacatccgcaagaagatcacgagccgcacgaaggccctcgtcatcatcaacccgaacaaccccaccggctcgctctacccgcgcgaggtgctgcaggagctcgtcgacatcgcgcgcgagcacgacctcatcatcttctcggacgagatctacgaccgcatcgtcatggacggtttggagcatatctccatcgcctcgatggcgcccgacgtgttctgcgtcacgttcagcggcctgtcgaagtcgcacatggtggcggggtaccgcatcggctggatggtgctttcgggagacaaggcgcgggcgcgcgactacatcctgggcgtcaacatgctgtgcaacatgcgcatgtgctcgaacgtccccgcgcagtccatcgtgcagacggctctcggcggacaccagagcgtgcagagctacatcgtgccgggcgggcgcgtgtacgagcagcgcgagtacgtgtacaacgcgctgaacgacatccccggcgtgaccgcggtgaagcccaaggcgggcttttacatcttcccgaagctcgacgtgaagaagttcaacatcacggacgacgagaagttcgcgctcgacctgctgcacgagaagcgcctgctcgtggtgcacggcggcggcttcaactggaagaagcccgaccacttccgcgtggtgtacctgccgcgcatcgaggtgctgggcgacgccatgcgcgacctgggcgacttcttgagccgctaccggcaagcgtgagggcgcgcgcctacgccttgcctttcaccatggacagcgagatcttgccgcgatccttgtcgatgcccgtcacccacaccgtgaccgtgtcgcccacggccacgacttcgctcggatggcgcacgaagcggtcggccatcttggagacatgcacgaggccgtcctgcttcacgccgacgtccacgaacgcgccgaagtcgacgacgttgcgcaccgtgccggtaagctccattcccacggtcaggtcgtcgaagtcgcgcacgccctcgctgaacacgacctccggcgcatcgtcgcgggggtcgcggcccggcttttccagctcggagacgatgtcgcgcagcgtgggtgcgccaacgcccagatcggccgccagcgcgtccacgtcgccgaggcggctcgcgaagtcggggacgccgccgtcggcgagcgcttcgggcttcaccttcgcgcgcttgagcagttcgtttgcgacggcgtagctttcggggtgcacgctcgtggcgtccaacgggttcttgccgtccgagatgcgcagaaagcccgcgcagttctggaaggccttcgcgcccagcttcggcaccttcttcagctgaccccggtcggtgaacgcgccgtgttcctcgcggtaggcgacgatgttcttggccactgcggcgctgatacccgacacgtagcccagcaggctcgcgctggcggtgttgaggtccacgcccacgcggttcaccacgttctccaccacgcccgtcagcgcgcgctcgagcgccgcctggttgaggtcgtgctggtactggcccacgccgatggcctggggcgggatcttcacgagctcggccagcggatcctggaggcggcgccccaggctcatggcgccgcgcgtggtgacgtcgaggtcgggatactcctcgcttgccagcttggaggccgagtacaccgaggcgccggcctcgttcacgatggtgtagcgcacgggcgccttcgaccgggcgatgtagtcggccaccacctcctcggtttcgcggctgcccgtcccgttgccgatgacgatgacgttgatgcggtgcttctcgacgtaggcggccagctgggcctgcgtttcctttacctgggagcgcggcggggtggggtagaccgtggtgtggtcgagcagcttgccgtactcgtccagcacggccaccttgcagcccgtgcggtagccggggtcgagcgcgatgatgcgcgccccacgcacgggacgctgctgcaggaggttctcggtgttcttggcgaacacgcggatggcatcggtctcggcgcgctcggtgagctcggcgcgcaggtcgcgctccaccgacggcgcgatcaggcgcttgtagccgtccgcgattgcggctttcaaaggggctgcgaagggaccgtcgccgcgcaggatgcggcgttccagctggctgatggccgcatcggcgtcggtgcgcactttcaccttgagcttcttctccttctcgccgcggttgacggcgaggatgcggtggttggggatgcgcgacaggggttcggagaagtcgtagtacgcctcgtagacggttttctcggacgcgtcgacggcttcgacggaaagcgcgccgtttcgcttggtggccgcgcgcaggcaggcgacgtgctcggcgtcgtcggcgacgacctcggccacgatgtcctgcgcgccttgcagcgcatcctcaggcgtggggtatcccgcctccgggttcacgaggccggaggccacggccagcgggtccttggcgctgcggtcttgcgcgaggatgagcagcgcgagcggctcgagcccggcgtcgcgcgccttcgaggcgcgggtggcgcgcttcttccgataaggcttgtacaggtcctcgacgcgctgcatgaccgtggcctcgtcgatcttcgcgcgcaggtcggccgtgagcttgccctgctcctcgatggcgcgcagcacctcgtccttgcgagcctcgaggttgcgcaggtaggtcaggcgctcgtccagatcgcgcagcgtcgcatcgtcgatgccgccggtggcctccttgcggtagcgagcgatgaacgggatggtgttcccttggtctacgaggtcgatgacggccgcgacctgcgcggcggtcaggttcagctcccgggcgatggtggtttggatggatggcatgggtgaatatctcgcttttggcttcaggtggtgataacgtgttcagtcattatagacgagcggacggaaagcaggagcgcgatgaatatccaggtgttcggaacgaagaagagcttcgacacgaagaaggcgcagcgttacttcaaagagcggcgcgtgaagttccagttcatcgacctgaaggagaagggtatgagcaagggcgagctggagtcggtcgcccgcgcggtcggcggcatcgatgtgctagtcgatccgaaggcgaaggatgccgacacggtgtcgctgctcgcgtacctgtcgcccgatcagaagttcgacaagctgctggagaaccagcacgtgctggccgagcccgtggtgcgcaacggcaagcaggccacggtcggctacgctcccgacgtgtggaagacgtgggagtgatcggccatgcgtcttcgcgcatccggatgtcgccgagcgaacgctttgctgacggggcgcgccgatcggtttcttcacggcattcgagcccgctcgggcgggatagtatagaatgagcgccatgctgtagaattcgacgaggaggttgtatcgtggacgcgaccgatatgcggtatctggaacttctatcccggctgtttccctctgcggacaaggcttcggcggagatcatcaacctcagcgccattttgaatctgccgaaagggaccgagttcttcgcctccgacatccacggcgagtacgaggcgttctcccacaccctgaggaacggctcgggctccatccggctcaagatcgacgacgtgttcggcgattcgctgagcgagaacgagaagcgttcgctggccacgctcatctactatccgcgcgagaagatggagctcgtgctgtcgcaggtggacgatgccgaagcgtggtacgccgtcacgctgcagcgcctcgtcgccgtgtgcaagcgcgccgcgcagaagtacacgcgctcgcgcgtccgcaaggcgctgcagaaggatttcgcctacatcatcgaggagctgatgacggagaaccgccacggcgttgacaagcaggcctactacgccgccatcgtggacgccgtcatccgaaccgatcgcggcggcgcgctcgtcgaggcgctgtgcctgctcatccagcgcttggctatcgagcgcctgcacatcgtcggcgacatctacgaccgcgggccgtatccgcacatcatcatggacgcgctcatggagcaccactccctcgacatccagtggggcaaccacgacatcgtgtggatgggcgcctcgctcggccagcgcggctgcatcgcgcacgtcgtgcgcaactgcgcgcgctacggcaatctgtccatcctggaggacgcctacggcatcaacatcctgcccttggcctcgttcgcgctcgatgcgtacaaggacgacccgtgcgtcgccttcggcctcaagggcaacccggacctcccgccgcaggagctggagatgaacgtcaagatccagaaggccatggccatcatccagttcaaggtggaggcgcagctcatcgacgagaaccccggcttcggcctggaggatcgcaagctgctcgacaagatcgactacgagaacggcacggtgatgctggacggcgtcgcctacgagctgaccgacacggtgttccccacggtggatccggccgacccttaccggctgacgcccgaggaggaagaggtcatgcagcgcctcgagcaggcgttcacgggctgcgagaagctgcagcgccacatgcgcttcttcctggatgcgggcagcctgtacaaggtttgcaacggcaacctgctgttccacgcatgcgtgccgctgaacgccgacggctccctcatggagacggaggtgttcggcgagacgtacaagggccgtgcgctgtacgacgtcatggagcgctacgtgcgcgcggcgttcgacgacgccaatcctgagctcgccaagcgcgggcgcgaccttctgtggtatatgtggctgggcgagggatcgcccctgttcgccaagagcaagatggccacgttcgagctgtacctgatcgccgagaaggaggcgcgcaaggaggtcaagaactcgttctattcctatctcgacgacgagcgcgtgatgggcggcatcttcgaggacttcggcatggatcccgagacgtcgcgcatcgtgtgcgggcacgtgccggtgaaggtgaaggacggcgaggatccggtgaagtgcggcggccgcgtgctcaccatcgacggcggcttctcgaaagcctaccagcccaccaccggcatcgccggctacacgctgatctcgaactcctacggcttcgtgctggcggctcacgagccgctcgagtcgatgcgcgccgccgtggtgaacgagctggacatccattcgtcgcgcaaggtggtggagctggtcgacaagcgcacgctggtggccgacaccgacaacggctcggtgctcaagcagcagatagccgacttggaagagctgctggaagcctatcggtgcggcgcgatttccgagaaggaataggctgtttcgtgaaaagccttctcaagcgcgataatgcgtttcctgcttgagaaggcttgcgctttcgaaacgaaggagtgccaatgaggaagttgccgacatgcgtgctggagaacgatgcgctgtccgtgcgcgtttcgcccgtgggcgcggagctgcagagcgtcgtgtgcggcggcgtcgagcgcatgtggtcgggcgaccctgcggtgtggggtcgtcgggctccgttgctgttcccgctgatcgggcgcttgcgcgacggttggtacgcgaacgggggccgacgggtggatgcgccgatgcacggtttctgccgcgaccgcttgttttccgccgagcaggtttcggatgtgcgcgtccgtttcgagacggcttccgacgagcggacccgggccgtctatcccttcgatttccgattgaccgtcgacttcacgctcgagggttcctcgatcgtgaagtcgcacaccgttgagaaccagggcgacgtccccctgccgttcgagctgggaggccacgaggcgtatgcgacgcgcttgttgccgggggagcgcatgtccgactatttcgtgcgcttcgaaggcgtcgatgtgctcgagatgttcgggatggacgaggctgggatactgacgctgccgaaggtcgaggtgccgctggaagacggccgcttgaccaagacgcccgagcagctgggtatcgacaccgtcgtgctggagaacgttcctggcagcgtcgcgacgctggctagtgtcgcgcacggctacgaggtgacggtggagttttccgattttccctatctgggcatttggacgaaggccggccaggacgatgcccgatacctgtgcatagagccctggtccgcgctgcccgacgcacgcttctccccacgtgagctgtccgagaagcccggcgtgcgcacgcttgcgcccggggagcgtgccgtgctggaataccggatgacgtttcgctaggaggcgccatggacgagaagcgcaggtgctcgtgggcgggcgacgtacccgtgtacgtcgactaccacgataacgagtggggaaggcccacccatgacgatcgcatgctgttcgagctgttggttttggagggcgcgcaggcgggcctctcgtggctgactatcctgaagaagcgcgaggcgtaccgcgaagcgttcgacggcttcgaccctgccaaggtggcgctctacgacgaggccaaggttgaagagctcatggctaacgaggggatcgtgcgcaaccgccttaagatcaacgcggccgtaaccaacgcgaagctgtttctggacgtggcccgcgagttcggaagcttcgatgcgttcatctggggctatgtggatggcgaacccatcgtgaaccgctggaaaacccaggccgacgtgccggcgaccacgccgctttccgaccgcatcagcaaggatctcaagaagcgcggcttcaagttcgtcggctccaccatcgtgtatgcctacctgcaatccatcggcatcgtgaacgaccacgtggtcgattgctatgcgtaccgggagcttacgtcgtaaggatggttcggcctccgtcgtcgtggcgggcatttgaaagctaggccgatgccgtttccccctcttcgtccagcagcttgcgcgcgtaagcgattgcatcgtcgatattgctgcggaaatggtcttctcccaccatgtccacgaaaccagcgcggcgcatggttttcatcggctgctcgttggcgtgcgagaagatgaggctgacgccgttctcgcggcagtacccgtagaggttctccagcgcgttcatgcccgtcgaatcgagcgatggcacgcctcgcatgcggatgatcaggtacttcgtgaaggatttcaccgatatgtcggatatgcggtcggtcatgccgaagaacatgggtccgttgatctcgtacacgcgcacgctttcagggagttcgcgcaggtgcgtgacctcggaatcctcgtcgcagtagtatttccagccgcgaacctcggtctcctcgctcaccatcttcatgaacaggacgaccgtgatcaacatgcccacggcaatcgccaccaccaggtcgaacacgacggtcagcgcgaaggtgagcagcagcgtggccaccgctcctcgggaggccgtcttgcacaagtgtgcgaaattgcgccatcccgacatgttgtaggcgacgtgcagcaagatggccgcgatggtcggcatggggatgagagccgcgtagggcatgaagaacacgaggacgatcagcagcacgagcgcatgggtcatgccggcgacgggcgttctgcctccgttcttcacgttcgcggcggtgcgcgcgatggcgccggttgcggggattccgccgaatagtaccgagccgatgttgcccacgccctgcgcaaccagctccatgttgctgcggtggtgcgagctgatcatgctgtcggcgacgacgcaggacaggagcgattcgatcgcggccaggatggcgatggtgatgccgttgggaagctggtcggccagcaggtcgacgttgagttggggaatgcggaattcgggcaggtcgctgctgatggcgtacaggtcaccgatggtgctcacctgcatgccgaagccgctgaccagggcgattcccacgatgagcgcgacaagggatccggggatgcgttcgctgaccttaggccaggcgaacaggatggcgaggcagaccgctcccacgacgaacgcttgccagttggccgttccgatgctttgggcgacggcctgcagcttgtccatagtctcgaccgtgggcgcgccggcggggaaggcgaggccgaggaagtctttgacttggccgatgacgagggtcacggcgatgcctgccgtaaagcccgtggtgatggtgtagggaacgaaccggatgagcgatcccagcttgaagaagcccatcagcatgagcagcacgccggcgatgacggtggctgcgatgaggccgtccatgccgtcggttgccacgatgcctgcaacgatggtggcgaacgccgccgtggggcccgagatttgcacgcggctgccgccgaggaacgcgatgaggaacccggcgacgatggccgtgtaaaggccttgctcagggctcacgcccgaagcgatggccagcgcgatggaaagaggcagcgccaccacggccaccatgacgcccgaaacaacgtctttgggaagctgtcgtttgagctcttcgctgtcggtgtgcttgatgatgctgaaaagtatcggtttgatcttgtcgcgttgcaatgctctgctcttccatgtcgtcgttcctgctcagtgcgcgcgaaaaagcgttccgcccggatcgaccgggcggaacgcaagcgaatactatgcggttggattcgattttgcgcttcgtcattatactgcaagattacaagagggcaacaaatcggggaaacccgggatccgtccaacgcagtcgcctagtccgtttcctctgtcccttttcgatcggcatcgtgcttttgacctgagtcgttaaacgatcgatcgcttcttgcgagtccttaattggcctgattctcgcaattggctatttaattgacacagcgggctcattatattcgaatcgcgaaaacttgaaagttgcacgacgggataagagcgggtggagcgagaagctccgcgaaggatgaacggaggccccttatgtcgggaaacgcggtcatcgaaagcctggaaactcggcgcgcggtgaggagttatgcagataggcccgtggagcgcgagaagctcgaggcgatcttggaggctgcaacctatgcgcctacgggaatgggggctcagtcgcctgtgatcgtgctggtggagagcaaggagaccagggacaaggtagccgccctcaacgcgggggcgatggggcgcgacaccgatcccttctacggggctcctgcggtcgcgatcgtgttcggccacaaggacgttgtgcctacctggttcgaagacgcttgtcttgtggcgggcaaccttctgaacgcggcgcatgccgtcggagtcgattcgtgcttcatctatcgtgccaaggaggtcttcgagaccgacgagggtcgggcgcttttgaaggagtggggcctcgacggtgattacgtgggcgtcgccaactgtattctgggctacggcgacggccctgcacccgagccgaaaccccggaaagacgggtacgtgagaatcgtttaggcggaacgcgttgggagccgattcttttggagtgagaggatgaaaatcatgttcaaaagccccttcagtcgctggtgcgaccagatgtggctttacctcgtttatcttctcggggttgcgatgacctgttatctgctgtggaattgggcagcgttcgatcttccgcagaaactcgcctgcatgctggccgttgcggttcccttgcatgtcttcgaggagaacacgttccccggaggtttcttctacatgaacaacatgggcttcggttcgaaagaacccatggtctatcctcagaaccgctgcaccaacatgatcacgaacctaggagccgagatcgtcataatcgccgttgcgctcaacgctgcgacgatcgaaccggttgtcatgagcctggtggtcttcttcgcgctgggggagaccgtgaatcacacgcgtagcggcatcctcatgtaccgcaagttcaaagaccggggaaagcgaaccgtctacggtcccggcctcgtcacgtcttggtgcgtgctcgtcccgatggctgccgtggcgctcagatggctcgtcgactgcggggcgaccgtgtgggaggtagtcggcggcatagggatattcctggggatcgccgtattcctcatcctcgttccgttcgcgttctctattcgcatcatgagcagggaatacgccttccgcgacaggggctacttcgagaagtacgttgacggctcgcgttgagggctggttgatttgcatgctttgtttttctcttggatgggttcgctggggcttgttcaaggagaagggcgagagaggatatctccagttcggtgatatctggagaaagaacaattcatgcagatttgtatagcatatagatgtcatacggcatcactctaaactcagtggtgcaatcgttccaaaaaggaagggaggcacggcatggccactgcagctaaaccgacaacgatccgcgtcgatgagaatcttaaggcccaggcgaacgagatcctcggatctgtcgggttgagctacaacacctatgttgtcatggcgacgcaccagctggtgaaccagtgcaggatccctttcgagatcgttccggcgggcggggtcccgaacgaggagacccgccgcgccctggtcgccgcggaggcgaaggagctcggcctcatccccgacgacgcgcctgcctttgacgatatcgacggactcgtggcgttcctcgagaaggagtagcccgtgtacgagatcaaggtcgagtcggccttcaaggcggactacgctcgcgtcatgaaacggcacccccgcttgaggggcgaattcaaggaggcggtctcggagctcatgaggaccggcgcggtgccggacgagtacggcccgcacgagctcagcaatcctggcgagaactacaacgggcacatagactttcacctctcggacggcgtggtcgatgtcgtggtgctctaaatgccccataagtcgaacccgatcatcaggctcgtccgtatgggcagtcacgacgagctgttccggggtcccctcatctagagggctatcgtctcgcgtgcgatttggttcgccatcttggtgatgtcggacgtagctctctttcgtgcagccattttcaggtctgcgaagttcggcaaagaggcaaagtactgacgaggcttgttcggataagccttcagtttcttgaaatccctagaatcgaaaaaaacgacaatggacttttttcctctgcgtttgtcatcttcaggtgtttcattttttgcctatctttcgattggcgaatgcaaagttgtcgacaaggcgggagcgcagtaaacgttctcgtcatcgaagtagaacacctgaggcttgttgaacagggcgttcgctttcgttatctcgtgacggaagctgtcgacgcagctgtctctcctcgctaaaatccgctcgctcgcttttttgcgcctatcgtcattggcgttcccgatcaggttactggcgtctatgagggcctcatcgaccggaccgtcgctgatgacgggaatcttggcaattgcgccgccggcaagtttgccgaaagcggaaactccgccgaggagtgcgttctcgacagagctcgatgcaagctcttcgatcttgttgtaagcgtcggtgtacagggctctgtaatcaagagagtacgattcaagcttgtcttcgatattcctgaggtagtctgctgagaagttctcggtaagcatgacgtcgacgtaggtggcgaagcccagcatgtagagcgccgcctggtattggccgagcaacgagtcggccttggcggatactttgacgatgtcgcggtccccatggaaaaaccctttgtttttgtcgagcttcgctacttgcgcgcggtagtactcaatatctttctcggcctctcgctcgatgctgactacctcttgctgcctcgtggatcgccatttctcgttatcgacgttgtacttgaagttactgagggtgtccgcgaggaattttatgttacctttcagggaggctttcttctcctcttcgaggatgccgaggatctcctcctgattctccttgatgttatcgagcttcgccgagacatctgcgagtgctacgccgatggcgagcatcatcggatcgacggccattaacgcagtcgaggttgttgttgtcgggttcgccgggacgtagacgccgttgccgatgatgcccttaccgtcttggattatcgctgtgagctgcccgctaccgtccttcatctgagcgacgtggccggccaagcccctgctgtcgaagcggaagaggccatcgttcgggatgctgatggtctgggtgaccgtcctgaaggtttcggacatgctggcgagcgcgccgccggccaaggcgagctccgccagtggaagtttgaccgccctctgcttgtccaactgctcgacggggaagtacggtacgacttcgaggctcatcatcgccttgactatctcttgaccggagtgcgacaactcatcttccatcctgttttccttcccgcgttttcgactttgtcaaaaccacatcgtcttcttgctgttgaattttacctaatctcgaaacgtcagacactgtcagcaggccgatgccagcgaggaacccgaacggtagctcgcctctcgcgatttcgcaaaggcgttcgtaagagcgcccccgtaccttctggtggatgcgaggagccgagttggcattactgatttgcgctgttacatttccatgatttgccgcttctttttatcaaattcctcttgggtaagtgcgcccatgtcaagcagttcctttaacttcttcagcaactccaattgctcttgcatgaacatcgttcctttggtcatgctcgatgtagagctatcgggctcttcaggctctccttgaatatcattgagcaccctacgttccatctttgcttgctccatacgctgttggaaccccatcgaagcgcgcatatccgaaccgcttagcaaatcgcctccacctactccaagacccccaattattccagttgccgccttggagaatgcttgctttttcgcggttcgctttactccgcgcatcaccccgttcatagaaaggtctccggacgatagcacgcttttcgctacattgccaacgaacgatgcgtccacgccgttctcgtcaacgcgctccgtctgttcgttatccttttccttttccgccagatcagggagatcgctgtagtaggcggagtcatagctgctaccactgtctgacatctggtcgtttatcgcgagctcccagaccttcatcactcgtttgttccccgactggaaagcgaagtcgtcttggccgccagggtgataaacctcaagctgcttttctccgttcgaagcctcgccaaccacaatctggcttaccgagtcgaaggggtagcgcaccgtgtccttgtagtttccgaacaggccacgactgatatgcacgaacgccatgttcgtgagcacgagctcgtccgtatatgcgtcccaaaagccatgtctaacgcaagaaccccttaggaggatcttctcaccgggtagtagttgaattttagaagcagccacgctttccctcccttgcagcatagcgaacgcagatattatatatggcattatacgcgtgttgtgttcttggaaagccgcagtgaagtaccagcctcatctgtcagagcggtgtcttctgtggaaattaagaaagctttggtttgccaaaacgtgggcatctcccgttgccgcgggccatccatgagcatgcggcgccaccggtcccggtcgcggtagcctgatgcgccaagtctgccgagaaacatcgtctgggttacctcgtcgagcctcgcgaagtcctcgcgcatcccgttctcgatctcggacgagacctcccgcatgtcttcgaggactcgcatcttttcctcaagggggtagttccccggggagacctccgcgagctccgccctaaagtaggcgaggtcctccgcgtcctttagagcttcccaatcctcggtcatttgaacccctccctacgcgtctgcctggattctcctggttctctcgggtgtcgcaaaaggtgccacgaatatcctgtttcaagtgtcttggagtatgacaaaaggcttcgtccaaataggacgaagccttttgttgacctaggggtatgttagttcttgttaccgagtgttccgaagcgtcagaccccgaaaactattcccactcgatggttccgatgggcttcggcgtgaggtcgtagaccacgcggcaaatccccgggacttcggccaaaatgcgctccgtgatcttcttcagcagcgcccaatccagttccggcacctcggccgtcatggcgtccaccgtgttcaccgcgcggatgatggcgggccactcgaaggcgcgcacgccgtcgcggacgccggtggcgcggaagtcggggacgctcacgaagtactgccacaccttgccttcgaggccggccgcggcgaactcgtcgcgcaggatggcgtcggcctcgcgcagcgcctccaggcggtcgcgcgtgatggcgccgaggcagcgcacgcccaggcccgggccggggaacggctggcgctcgaccatgccctcgggaaggcccagctcacggccgatgacgcgcacctcgtccttgtacagcagcttcacgggctcgcacagctcgaactgcaggtcgtccggcagaccgcccacgttgtggtgcgccttcacgccgtcggattccaggatgtcggggtagatggtgccctgcgcgaggaagctcacctcgtcgcccaccttgcgggcctcctcctcgaacacgcggatgaactcggcgccgatgatcttgcgcttggcttccggttcggccacgtcgtcgagcagctcgaggaagcggtcggtggcgtccacgtacacgaggttcgcgtccagctggttctggaacacgtcaaccacctgctcgctctcgcccttgcgcatgaggccgtggttcacgtgcacgcagatgagctgcttgccgatggccttgatcagcagcgccgccaccaccgacgagtccacgccgccggacagcgccagcagcaccttcttgtcgccgatctgggcgcggatcgcgtccatttgctcgtcgatgaaggcgttcgccagctcaggggtggtgattcgctccatgtcttcggggcgcttgttggggtccatgcgggggtcctcctcgtgttcggcaatgatctgaggaaattatacgtgaaatggcgcgggtgtataggcaggtcgttcgttctttcggcgccctgctcagtatcccatctcgtagaggcgagcgtcgtcgatgccgaagtagtgcccgatctcgtgcacgacggtcttcccgatctcctcgacgatctccgcgcgcgagccgaagcagcgctcatggggacctttgaacacggtgatcacgtcggggacgtcgctgtcgtagccgtcggcgcgatcgggcagcgacacgccgtcgtagagccccagcaactcgttgtcgcagacggaagcccctagacagtcgggttcctcgagggtttccagatggtagtcgttcggctcgtcctctacgacgacggccacgttctcgagcgcgtcgaggaaccgctcgggaatgcatccgagcgcctcctccacggctgattcgaactcgctgtcggtcatgcggtgcatggcggcctctttcgtcggcgggcgcgcgggccctcggcccacccggttcgctgaaccggcagacacgagtataccccatacgatttgtactgtgtgccgcacattatcgtgtgaactatgttatagtgtgcgacacacactatccgacgcaaccgcaaaacctgcggcgcagggaagcggcactggaaggaggggcgcatggcgtacgacgacatcgtatcgagcatggtcttggaacttcggcgcggcacgctggtcatgctcgtgctgagccagctgcgcgagccggcatacggctacgcgctggtgaaatcgctggccgaccacggcatccctatcgaggcgaacacgttgtacccgctgatgcggcgcctcgagtcgcaagggctgctggcaagcgaatgggacaacggcggctcgaagccgcgcaaatactaccgcaccaccgacgagggcctgcgcgtgctgcgcgaagtggaggcccagtggcacgttctgtgcgacggggtgggcaagctgttggagacaaacggagaggatcgggaacatgccgaacgataacgacctgatcgagcgttacctgtacgccatcacgcggcacctgcccagcgcacagcgctccgacgtggccgaggagctgcgcacgcttatctcggacatgctggacgagcgctgcggcagcctgccgcccacggccaaggacgtccgggtcgtgctcaccgagctgggaaccccgggcgagatggtgcgcaagtacacgagcggggaaggggaatgcctgatcggacagccgtactacgcacagtacctttacgttctgaagatcgtgctggcctgcgtcgcaggcggcatgctggtcgccggggcgctgtcgctcgcaacgggcgcggaagggagcctcctcggaggcgtgctggagggcatcggatccctgataggggcgcttctcttcgcgttcgcgatcgtcaccctgctgttcgccttcttctcccgccggggcatcgaggtcgagacgatgggctcgctcgacgacctgccgcccgtgccgcgcgagaccaggtcttccacgcgcggcgacgcggttgccggcatcgtgttctccatcgtgggcgccgttgtgttcctgctgttccccgacgtgctgaacgcgctcagccatcgcgcagacggcgtgccgttcgatccgttcaacgtcgacgccttccgcgcttcggcatgggtcgtcgtcgtgtggacgttcgtgtgcgtcgccggcgagagcttcaagctggtggaaggccgctatacgaagcgcgtgctggcggtgacgttcgcatgcgacctggtagcgggagcgctcgtcgtgttctggctgacgaacttccagctggtcgactcccatgccgtcgtccaggcgatgcagtcgtcgggcaaggcgctggagggcccggtgctgtgggcggtgtccaacgcgcagacggcgttctgcggtctcgtagtggcggcgctcgtcatcgacgccgtggactccatcgtgaagacggtgcgtgcacggtaaggcggccgtcctgtcggcccgcgcgcccctcgcggaaaggcgcgcgggcgttgctagatcgcgtccgacctcagagcctccacgatgttggaggcgtgcgagcggcgcagcgcgtaggccacgctgagcgccagcacgacggccacgatggccacggcgagagccacgtagtcccacggcagcgtgaactcgaggccggcgaacgccatggacgttgctgcaaacagcgcgaatgtaaccgctacggctgccgccagccctatccccaaaccgcgcagggcgtagctcgcgcactcgtaggccagcattcgggcgaaggcgcggttgcccatgccgatggaacgcagcgcggcgaactcgcgcgtgcgcaggatgatcccgttcgccagcgtgttgaacacgttggccacggcgatgagcgtcgtgatgacggagaagcacagcacgaacagctggaaggcctgcgcgatcaggcggttctggcgcgccgcattctcgatgtcgctgacgttgaccacgacgtcgcccaagtcgcgcgccagcgcctccagctcgtcggaagccttcgcgtgatcctccgccgtgaacgaggctccggcgaacgagtacgtgtacgggttcgagtggtagtcgcccagccctgcggctctctccgcaacgctctccggcaggatgatcgaggggaagtggttgttggccgcgatggcgttcagcacggccggctcctcgtcgcagagcgctcctatctcgatgcggaaagccgtggccgcctcgtcgatcggggcggtgacgatgtcggccgtcccgctgaccccggcctcccggtcgaggtaccccaccaggggccgtccgtccgggccttcctgcaagcccatgttggagaatccttcgcgctcctcggtgacgtacaggtcgacggcgccggtgcccgcgaagggcttcgtggacacgtacgtgccgtcgggcatcctgtcctgataggtgttcaggccgatggcgcgcgggttctccgggtcggtgtaggcggctacgtccaggtcgagctcgtccagcagcgcgcgccacgaggcatcgtcgacgaagaaggtgtacagggccccgtagtaatcgccgtcctcgccgaagctgtcgggcacccagtcggcgctcgtctgggagttgtaagcctgccgagcagcgcgcgcctcttgcgatatcatgcgaccgtcgacgacgctttcggcctgaccttggcggcacgagcctatgagctgcaagccctcgatctcactcgcccgcgccaggaactcgtcgtattcggcggcgtagtcggacaggtcgttcccttcgcgcggggtggtgtagtcgggatgcgccgacaccacgatgtcggctccgctcccagcgccgcgcgagctgctggcgcggtcggacagcggcgcgaggtacagcgccgtgctgccggcgaccaccacgagggtcacgctgaccgcgagcgatgccaccacggtgcgcccgcgcgtcgccgagcgcgacaggttgcggtgtgcgacgaacccggggatgccgaacagcctgcccgcgatgcccagcttcacgcgcccgacgtcgggcgcgtgcgatggtgccgaccgttctgcgcgcttcgagaggcgcacgtcctgcgtttggcggatggcgtcgacggctgagacgcgggcggcgcgggccgacggcacccaggcgctcaccagcaaagtggctatcgacagtgccgcggccgcagccaacgctccggcatccacgtgcaccgcgagccccgccgatcccgatcccaacatcgcagcgaacgcctcctgcgacgacgagaacgcgcctgccgtgcccgccacgcccgctaagaggccaatcggcacgccgacggctcccagcagcagcgcctctgccagcacggtgctgcgcagttgccgcttcgaagcgccgagagaggccagcagtccgaactgccgcgtacgctcggccaccgagatggcgaatgcgttgtagatcagcgatgcggacgccgccacgatgacgatggccaacacggcggcaaccgcccagaggcttccccagatgggcctgccgtcggagatgcccaagtacgagaacaggctggtgtggtacagagtggcggccgtatcgtccaatccggtcgcgtcggcgaagaaggccttcatctcgtcgagggttcccagaccttgcgtgaccagatacgcgcccgcagccgctccttcctcagacgcgtcggccacggtgagggcgacgctgggcgcggaagaggccgtgtagttgttggcgaggaaaggcgcttgtcgcttgtagaatccggtaaccgtcagcgtgcgctcgcgggcgttctcgacgcgcgtctcgtttccgtcggcgaggcgcgcgccgtcttcggcggctgcgaggtttccaaaacctcccgtgagggtggaacccgtttcaagggggccgttcgaaacaacgccctcggcgcctcccgcgcccagctcctcgccttggagatagtcgggcagcacgatctcgtccgctgtctcgggccatcgcccgcttgccagctcgggcatcagggagtacggcgcgccgcccggctcgtcgacgcccttgacggtggtcggcgtcgtcttcagcgcgatgaacgcacccagacggttggcgtcgtcgggcgcgagtgcggccgatccgaggtcgcggaaggtggcgaggtcggtcacggcgtcgctttccacgagcgcatcgatgccctgagcgggcacgtcgggggaaaacacgtgccatgatccttcagttaccatcgtgcgctcgagcaagccctgctgcacgcttgccacgctggtcagcacggcggccagaagcgccgtggacagcgcgatgccgacgacggtcacggccgtgcgcacgcggttctgagcgagcgagcgcagggtgaaacgcgtgaatatgccggccatcagcgcctcctttcgtcggaggcgatgcggccatcctcgatggcgatgacgcggtcggccatgcaggcgatgtcctcgtcatgcgtgatcaccacgagcgtctggtcgaagcgcttgttcgactcgcgcaaaagcgccatgatctcgtgcgagttgcgcgagtcgaggttgccggtgggctcgtcggccagcaccacggcaggcgcgttcatgagcgcgcgcccgatggccacgcgctgttgctgtccgcctgacagctgattgggcaggaagcgctcatggccgcgcagtcccaagccgtccagaagcatgccgaggcgctcttcgttcacggcgcgtccgtccatgagcacgggaagcgtcatgttctccaccacgttgagcacggggatgaggttgtagaactggtagaccagccccacgtcgcgacggcgcagcacggccagctcctcgtcggagcgcgcgtacacgtccgcgccgttcagcagcaccgtgccggaggtggggcggtcgacgccgcccatgaggtgcagaagcgtcgacttgccggagcccgacgagccgacgatggccacgaactcgcccgcggccacgctgaacgacacgtcgtcgagcgccttgagcgccgtggggccgcttccgtacaccttggtgagatggtcgatggtcagaatgtccatgaggagcctttctcgctaacggtctacggaatagtgtgccatcccgcgcttgcgcgggcatgaacgccgcatgacggaattgtcatattcggccagcccgccgttccgggcgaagggcctcctacacgaccaccttcgggaacgtcaggtcgaagcgagcgccgcccgtttcgcggtcgttgcccgcgcgcagcgtgcctccctgggcggtcacgagcgcctgggccagcgcgaggccgatgccgaacccctccgatcccgcgccgcggtagaagcgctcgaacaggcggggaaggtcctcggcggcgatgcccgggcccgtgtcggcgacggacaggcggaaggccacggcgtcctcggacgcctgcacgcgcacgcatccgccggcgggcgtgtgctccatgcagttcttgaggatgttgcccagcgcctcggccgaccaggcggcgtctccgttgaacgacgctccctcgtcgacgtgcgtctcgcaggcgacgtcgcgcagatcgaaggcgccggccagcggggccagcgcgtcgcgcacgagccgcgccgcatccacggggcgagcctgcacgcggatggccccggcatcggccttcgccagcttcaacagcgccgtgaccagccatcccacgcggctcacgagcgtttccagctcgtgcagcgcgcggatgcgctcggcctcgtcgctcgtgcgctcggcggtgccgatgagcagccccatggccgtgagcggggtgcgtatctggtgcgacacgtcggccagcgcgtcggccagcgcgttcttctcggcgtcgaggcgctcggtggcggtgcgcagggcggccaccatcttcgccagctcgtttctgagcacggccagatctccctcgcggtagtccgagaaggcgatgcgccggccgccgtgcagcacctcgtcgacctcggacgccaaacgcgcgatctgccggtaacgccgcagcgagaacgtcgcgaacagcgcgcaggccagcgctccggcggccagcacccacaggcccgcgcgcggtccttccaccgcggcggccgctgcggcgaagacggcaagcgcccccgcgagcagcgccaactggcaggcgaaggcccggttcctcgtcaggcccatgtcacgcccccgtccggtagcccagcccgcgcacggtgaggatgaggcggggttcggccggatcgtcctccaccttgtcgcgcaggcgcttgacgtagacgctcagcgtgttgtcgctgacgtattcgccggcgctgtcccagatggcgttgcgcacgtgctcgcgcgtgaccagcttgccccggctctgcgcgaacagcaggagcagccggtactcgagcgccgtcagcgccaggtcgcggcccgccttgcgcacgcacgcggtgccggcgtcgatctccacgtcgcccaagcgcaaaagcgacgaggcggcgttcgtgcggcgcagcaccgagcggatgcgcgagagcagctcgcgggcgcggaagggcttggcgatgtagtcgtcggcgcccatgtcgaggccggccacggtgctgaactcgtcgtcggaggccgtgaggaagatgacggcgggagccgggtcgcacgccttggccgccgcgcacacggcgaacccgttgccctgggcgagcgccacgtccaccagcgccaggtcgaaacgttcgctgcgcagcaactcgacggccgcgtcctggccgtcggcacagcgcgtctcgtatccttccgatcgcagcaggtccgtcaagctggcgacgatggccgcgtcgtcttcgacgagcaacatgcgcatggggcgtccttcccttcgggtgcatcgtctccacggtagcagaaaacgcgggaaaggggaggggaggatcagccttcttcgtcgtcgacgaactccaggatgtcgccgggttggcagtccagctccttgcagatggcgttgagcgttttgaagcgcaccccgctgaccttgccgttcttcagcttcgacagattgccgtcggctatacccaccttctcggccagctctcccagggaaaccttgcgatcggccatcatccgatcgaggcgcagcacgatagccatgctgccctcctagatgatctcgaagttctcgtcttggacgagatagccgtactcgatgatctgcccgaggcagaacacgatggcggccagcatgaaggcgaacatgaccgattcgtccacgagagcgccggacagcgttccggtttggatgctgacgactgcccagtacagccacttcggcaccgcgagcgtcgcgaaaaggagcacggccaccgctttgatcttgcgcggcaggtttgcgaagaacggcgtctcctcgcgattgatgcgcagaaagacgagagcgacgtacacggccaacgcgacgagaagcccgtccccgagcaatcccatgccgtggcgcacggagtcggggttcgacagcgcttcaccggtcgtcagccagtcgaagatattgatcgacgtctgaatgccgaacagcagcgcgatggcgaggatcgcgacgaatgtggtcatgctggtcgacttgatcttggcgcgcgtcttgtccataggggtctcctcgctatcggatggctcccagtatacgccgaaacatgacgcaaaatgatatgaatatgacgttttacgtcaaaacatgcagccggtcgatctacagatccacccagaacctcgagttcttgtacagctcctccactttgctgcgcgcccacggggtcttgcgcaggaacgtgagcgagctcttgaagttcgggttcttcttgaagcagttgatcctgatgcgcttggccaggccgtcccagccgtacttgttcaccagctgcttgagcatcgtctccagcgtgatgccgtgcagcgggtcgttgggatgctgccgatctgcggggttgtcgggcatgggctctccgtgttcctcgaaacgtgtgcgctccatgatgacgcatgtgcgcggcgtttcccgccggaaacgaccgcaatcagcgaaacatcgtgcaaaatcaggcgtatcttcgctccaaaaacacgccccagcggacgaagcgtgtttttggagcgaagatacgcctttctctgtttgcgtttaccgacggcgccccatcgccagcaccgcgcgcacgccgaggagcgtgaacgccgccacggcgacggcgcccgccgctccaccggctatgagcccgccgacgagccctgcgctcttcccgtgggcatgctcggggtcttggcatcgccgggcgtccggcgtcgcgggtcgatgcggcccctccggcccatccggcgtttccgccgctgagggcgcgtcgcgctcctcctcgtttcccatgagggtgtccagcccccggccgagggctgcgggacgggcgcttccttctttcgcgttcatggctgcctccttctgcttggcttgtccttccgctcggcaccttacgcttcgggcgcgtcggcgcagcgggcgggcgcgcggcgtgggcgaggcgagtcgcagctgtaacgttcggttggaaagcgtttgctcggatcgaggccgaaattaaagatcggacgagacgaagctgtcgatgaggcgcagggcgggatgggccacgatgccgcccgccagcgcgcctcccgcgcccacgagccaatcgaagaagctgaaggggtggtcgggaaccatgagcgacaccgctccgtcggcgatgcccagcatgcacgtgatcaggacggccgctgcgcaggcggtgagcagtcccatatgctgccacagcgcgttcgccagcaggaagccgagcaccgcgaactcgacgaagtacgccactgccgaaggcgcgctcacggcgggcccgaagtacacgaccgccgcccatgccgcggccagcgcccagcgcccgaccacgatgaagcgccgccgcttcgacatgcgcggcttcgcatctccgatatcttgcatccgatcgtccatgcccccaccataccacgccccccgatccgacccccgacacgggcaccgtaccgttgcctgcgacgtttccccggacgtcgcaggcctgtccgaacggatgtttcacgtgaaacatcgacatcgaaagatgcatcatcgcccgaaaaacacgcaaaacggccttctagcgtgtttttcgggcgatgatgcgacgctgcgacccttctgcaacgtgccgcgccgcctctctcggggcggcgcgggcgattcgctcggatgacgcaagcggcttacttcttcacgttcatcgccctcatggcgttcaggatggcgatcacggcaacgcctacgtcggcgaacacggccagccacatgttggcgatgcccacggccgccaggaccagcacgaggaacttgatgccgagggcgaacacgatgttctgccacacgatgcccatggtcttgcgggcgatgccgatagcgcgggcgatgttggacggcttgtcgtccatgagcaccacgtcggccgcctcgatggccgcgtccgagcccatcgcgcccatggcgatgccgatgtcggcgcgcgtcagcacgggcgcgtcgttgatgccgtcgcccacgaacgcgagcttgcccttgccggagccgtgcgcatgcgtctcctccagcagcttctccacttcggcgaccttgtcctgcggcagcagctgcgcgcggaactcgtcgatgcccagctccttcgccacggctgctgccacgtcggcgcggtcgcccgtcagcatgacggttttcttcacgcctgcggctcgcagcgcggcaacggcctcagccgcgtcgggcttgacgacgtcggcgatgacgatgtgcccgatgtactcgccgtcaagcgacacgtgcaggatggtgccggtcagctcgcactcgtggcagcccacgccgcattcgctcatcagcttgtcgttgcccaccagcaccacgtgctcgtcgatcttcgcgcgcacgccgtggccgctctgctcctgcacgtcgtcgatgcgctgctggtcgatgggccccgagtacgcctgcttcaccgacagcgcgatggggtggttcgagtacgcctcggcgtgcgcggcgatggacagcaggcggtcggggtcgatgcccgcctgcgggtggatggccaccacgttgaacgagccgtcggtgagcgtgccggtcttgtcgaacacgacggtctcggtgccggccagcgtctccaggtagttgctgcccttcacgagaatgcccaggcgcgaggcgccgccgatgccgccgaagaacgacagcggcacgctgatgacgagcgcgcacgggcacgacaccacgaggaagatgagcccgcgttgcacccattccgaccagctctggcccagcagcagtggcggtacgacggccaagagcaccgcgatgcccaccacggccggggtgtagtagcgcgcgaagcgggtgatgaaattctcggtcttggccttcttctcggccgcgttctccacgagctcgaggatgcggctcacggtggactcgccgaagggcttggtcacgcgcacggtgatgaggccggtcatgttgacgcagcccgagatgatctcgtcgccctcgcgcacttcgcgcggcaccgactcgccggtgagggccgcggtgtccagctgggacgtgccggacagcaccacgccgtcgagcggcacgcgttcgccggctttcacgacgatctcgtcgcccacggccacctcgtaggggtccacctgcacgagctgcccgtcgcgctccacgttggcgaagtcgggcgcgatgtccatcatgtcggcgatggatttgcggctcttgcccacggcgtagctttggaacagctcgcctacctggtagaacagcatgacggccgcgccttcggccatgtgcgggtcgctgtcggggaacagcaccagcgcgaacgcgccgatggtggccacgctcatgaggaagttctcgtcgaacacctggccgtggccgatgttcttcgccgcgcgcagcagcacgtcgtagccggcgatgagataggggacgaggaacagcgcgaactccgcccatagcgccgccgtctcgctgccgagccacgtcgacagcggaagcagctccgccacgacgtacacgacgacgaacagcgcgatggcgaggaggatgcggtttctcgtgcgtttctgtttcttgttcatgatctccaaccttgtggtccggggaagggcgcaccgcgccgccggaatgtttcacgtgaaacatccgttcgcgcgggcggctcttcgattgtcggcgggttagcgcaggatgacgcagtccggctcgaacttcttgcaggcgcgctgagcttcgtccagcaccgcttcgaagcggtcgtcgtcggcttccaacaccagcttctgcgtcatgaagctgatggaggcgcttttcacgccttcgatgttcttgatggcgttctccatcttcgcagcgcagttcgcgcagtcgagatcctggagtttgaatgcctttcgcatggcggtgtcctttcgtttcggcgtagttgcgagcgggggcgcgcggtgcggagtcgaagcatcccgtgccgcggccgatgcggggcttattcgcagatatgggtcatgccctgggcgagcatcgtgtacacgtggtcgtccgacagcgagtagatgacgttcttgccgtcgcgctggaacttcacgagacgggcctgcttgagcgtgcgcagctggtgcgagacggcgctttgcgtggcgccgataagctcggcgaggtcggcgacgcacagctcctggcccatgagcgcgtacagcatcttgatgcgcgtcgtgtcgccgaacaccttgaacaggtcggcgaggtcgtacaacagctcctcgtcgggcatgcactcggggctcggcgcgaccgcatgctcggcgctgccgcacgagcagccgttgtcgtgcgcgttctgggcgtcttcgcttccgggtgccgcttcggtaatcttgtctggcttcattccgtcaacctctcaacatatgatcaactgttcataagtatacggacaacaaggttcgtgtcaaggggccgaaggggaaattcccgcttgttgtatttccaacgcagcgcgctgtcgagccatgctatgctcccggacgatagcgaagaggacgacttgtttcgggaggaatctatgctgcggaagatcatcgagatcgacgaaacggcctgcaacggctgcggcctgtgcgtcgcggcgtgccatgagggcgccatcggcctggtggagggcaaggcgcgcctgctgcgcgacgactattgcgacgggttgggcgactgtctgcccgcgtgcccgaccggcgccatctcgttcgtggagcgcgaggcggcagcctacgacgaggctgcggtcaaggctcgaacggcgcaggagaattcggtcgcacgcctgtcgggcggctgtcccggatcgctctcgcgcttcttcgcgtccgaagatcctgaggcgaagcccgcccggccttccgcttccgcccccgtcgccgaaccggtttgcgaagaaacgccctcccagctttcgcagtggccggtggagatcaagctcgcgcccgtgcaggcgccgtatttcgcgggcgcgcacgtgctgatcgccgcagactgcacggcgttcgcctacgccgacttccatcgcggcttcatgcgcgggcgcgtcactcttatcggctgccccaagctcgacggcgtcgactacagccagaagctcgaagccctgttcgcctccaacgacatcgcgtcggtcaccgtggcgcgcatggaggtgccgtgctgcggaggcctggaacatgcggcgcgcgccgcgctcgagcgcagcggcaagaacgtgccgttcgaggtggcggtgatctcgacgaagggcgcgctgctggagcgccgctagcgagcgaagccgcgattcgccgggggacgcggtcggccgaagatcttccgccgacgcagccctccgtacagatgtttcacgtgaaatatctgttcggacaagctccttcgccttcggctgtaatggtttgcgggttgtctttcgttgcgcgagagcggtcgtttgttcgtcgaggcttgaccgcttcggaagcgcgcgttcacactggtcgcaaggctttgcgcttttgccgcggccgggacgcataccctcgaaccaaaggatcaaacatggagaccatcgaagaattgttccggaaggtgttggacgacgaagacctgagggcttcgttcgggcaggcgctggagggcgaccgcttggaggttttccttcgggaaaacggctgcgaggctgctccttccgaggtgcgggaggccttggagggcatgttcagggaagagctgggcgacgagcttctggatgaagtgaacggcggaatggccaaatatcgtctgtatctccacgaaccctttcttaaaactacaagtgccgcgtcgcagaagatcaagatcatcaagggttagcggcttttcttctgcatctcgcggacgaagtcggccgttcggccgacttcgcggatccttcgccaccgacggcttccgcccgcaatttcgtacaagcggctcggtgcggttcgtggtatcgtctcctgcttggacgaaaggttttggatggagacgatcgaatcttggagcgcgcgccccgacgtgcgcggcgcgcggctggccgaccccgacatgggcgccgagaaccggcgcatcgcgccgttcgggccgtgcccgggcgtggagttcgtcacgctcgagggcatcgtgcagccgttcccgctccatttccacgatttctggaccatcggccagatggtgggagggcggcggcgcatgacgtgccgtggcgaggtgcacgatctggggcccgaggacttcgtgctgttcggctccggcgaggtgcacggctgcaagcctttggacgacgcgccgctcatgtaccgcagcgtggtcgtgcccgtcggcctgttcgcgcaggcgttcgccgaatcgcacggtatcggcgccgcgtccctgcccgacggcggccccgcttgccgcttcaagtccgtggtggtgcgcgacgcggccctttcggcgtgcatggaccggctgtacgcgttcgcccggaccgattccgcgcatgacccgctcgaggaggaagaagcgctttgggccctcctcgcgcagacggcgcggtattgcgagagcgaggcggccgagcccccggcgcccgaggccccctccgcggcgaacgtggcgcgggcgcgggcgtacctcgaagaacggttcgcctcgtgcatcactctcgacgacctcgcgtgctgcgcgggcgtgtcgcgctaccacctcatccgcgtgttctccgaggagacgggcctcacgccgcatcgctacctgcaggcggtgcgcgcgaaccgtgctcgcgacctgctggcggcgggcgtcgatccggccgaggtcgccgcgcggtctgggttcgccgatcaggcgcacatggggcgcgtgtacaaatcgttctacggcatcacccccggcagctaccgaacggcggcgcgcacgcgggtgcgggaaggatagcgagatggcggttcaaacaagcgaggccatagagggggcgccggcggatcagcgccgccccgccgtgcgcgggcatgcgctggcgttggtcaccgtggtggtgtgggcggtcacgttcgtatccacgaaggtgctgctcgtgcacctcgcacccatcgagatcctgttcttccgcttcgtcatcgggttcgtcgcgctcgcgctcctgcgcccgcgcatcctgcacgtccggggcttcaaggaggagcggtggttcatgctggcgggcgctaccggcgtgacggtgtactacctgctggagaacatcgcgctcacgttcaccacggcctccatcgtgggcgtggtggtggccgcggcgccgctgttcaccggcgtcgcgtcggccgtcgtgctgaaagagcgcctgcgcgcgccgttcttcgtcggcttcgcggtggccatggcgggcgtgtgcctggtcagcttcgcgggcggcgcgtcgggcggccttgtcgcagaaggcgggctggggcaggcggggctcatcggcgtggcgctggccttggcggcggcgggcacgtgggccgtgtactccatcgtgacgaagaagctctcgacgttcggctacgacagcatcctcgtcacgcgccgcacgttcgcctggggtctcgcgttcatgcttcccgcgctgccgcttctgggcttttcgcccgattggggctcgctcgccgcgcccgagatgtggggcaacctcgtgttcttggggctgggcgcgagcgcgctgtgcttcgtgacgtggaacatggcggtgaaggagctggggccggtgaagacgagcctgtacatctacctcgtgccggcgctcaccgtgctggcctcggccgccgtgctgggcgacccgctcaccccgccggtcgtcgccggagtcctgctcaccatcgcagggctgttcctttccgagcgcgggaagtagcgcgccgcgaggcggcgcacgcgtccgaaagcaacgtcggtggcgaaaaagcatcggattcggaagttcgcaaggggttcgaaggcgcagcgcaagctgcctttccgcatagtgcccgatcgcagaagggaagccgtgggattgcgcccgctcatccccgcgaagctcgcggctttcttccgaattcgatatgttttctccattacacgtctaaccggctgcacggagatgctcgggactgggcggcttcgagcgaagggttccaccgaacatcgttcgtcgaatggaaaacacgcacggatgtttcacgtgaaacatctgtgcgtcgcgatgccgagggatgtcggctccgtcgccgctccggcgtcgaagctttcgccggctcaacgctcgggacgcgcggtcagccgcacggcaccgcggtcgagcagcggctcgtagacgccgcgcagccatagggcggcctcgcccggttccagcgcgagcggcatgcggttgtgcacgggagccacggcggcgttcggttcggtggtgacgagcgagaaccgtccgcgatcgtgcacgcccgccagcaagagcggcgcgccgtcgggcgctgcgaaggcgtactggcgcttcacggggcgcccggtgcgctcgctcggcaccgtctcggtcgcatgcgattcgtagaagccccgagcaggcaccaggcagcgacgacgtgcgaaggactcggcccacatgctgccctcgccgcgcagagtcgtctcgatgcgcgtgttgaacacgggtccgttcttccaaggaacctcgtatccccaggccatatgggctaccgcgaggccgcatccgtcgcccgcggccacgatgagcggcacgaccgatgagggaagcgcctcggggcggctcgcgcggccgatcacgccggttccgcgggcttctgccggctcgtccgattcgtcgtcgaacagcgagagctgcacaggcgcctcttcgcgttccgctcgctgctcggcgcggtccggctgcgcggattcggggaagaagaggaagtcctcataggcctcgatcgggtcgagcgaagccagctcgtccgcgtgcgcggccaggtcgcgctctatctccgcagcgatgcgggcgacttcgtcgcagtcgatcggtatgaaacggcggcacatccacggctccttcctcgcgtttccgctcgcatccagtgtagcggttcgcacgacgatgcggggctaccgtgcggtgtccttcgcgtgacggccgcgttccggctcggctgcgccgctacctttcgcattggctgcagcgcgggcgagccgcctccgcgacgtcggcggcgcggccctccgtaacgcgtgccgtcgctccctccgttcaagcgctcgcggacgaaggggttgacaatacccttaaggggtatatactcgcgcttggataccctcatggggtatagaaggaaggaatcgtcatgaccgagaatcacgcgcaagctgaaaacgccgccttctcgtcgcgccccgcgtcgacgtgctgctgccaccgtaaggagacgccgcgctcggaagagctgcaggccgaccttcatcgtcgcttgaaccgcgtgatcgggcagctgggcggcgtgaagacgatgatcgacgacaaccgctactgcgccgacgtgctcacgcagctggcggccgcggaaagtgcggttcacagcatttccgccgtggtgctgcgcaaccacctggaaacgtgcgtggtcgaacagatcgaacgcggcaatgtggagatcatcgacgaggtcatgaacctgttgaagaagttctcgcgctaacccgcgctgaaagacaaggccgttcgtccgtttgtcgcggatgtttcacgtgaaacatccgttcgcgcgaaggggagggcggctgcgaaggagtaagaagtgaagcaaacgttcgatgtcaccggcatgacgtgcgcggcgtgctccgcgcgcgtggagaaggcgacgcgggccgtgccgggcgtggccgacgtggccgtgaacctgctgaagaacagcatggacatctcgttcgacgacggcgcggaaccgtcggccgtgacggccgccgtcgaggccgcggtcgacaaggcgggctacggcgcctccgcgcgcgtcccggcggtcgcgaacggcggcgggcagggcgcgggaagccgtgcggcccaggcgcgccccgtggccgacgcggccgccgaggccaaacatgttcgcatgcgcctcatcgtgtcggtcgcgttcacgatccccttgttctacctgtcgatgggacatatgttcggctggccgctgcccgggttcttcctgggggacgagaacgtgctcacgttcgcgttcacgcagttcctgctgctcctgcccgtcgtgttcgtcaacttcaagttcttccgcgtgggcttcaagacgctcgtccacggcgcgccgaacatggactcgctcatcgcgttgggctcgacggcggcctcggcgtacggcatatacgccatctacaagatcggcatcgcgctgggcgcgggcgacctgcacgcctcgcatatggcggccatggacctgtacttcgagtctgcggccatgatcctcacgctcatcacgctgggcaagtacttcgaggcgcgcgcgaagggcaagaccaccggcgccatcgcgaagctcgtggaccttgcgccgaaggaggccgtgcgccttgcggacggcgtcgaggagcgcgtgcccttggaggccgtgcgcgtcggcgacgtgctggcggtgcgcgcgggcgagggcgtgcccgtggacggcacgctgctggaaggctcgggcacgctggacgagtcggtgatcaccggcgagagcgtgccggtggacaagcgcccgggcgaccgcgtgaccggcgccaccctgaacagcaccggatggttcactatgcgcgccgaccgcgtgggcgacgacactgcgctggccggcatcatccggctcgtggacgaggccacctccacgaaggctcccatcgagaagatcgccgacaagatatcgggcgtgttcgtgcccgtggtcatcgtcatcgccgtggtcacgttcgccgtgtggatgttcggcggggcgacgctggagatcgcgctgtcgcacgccatcagcgtgctggtcatctcgtgcccgtgcgcgctcggcctggccacgcccacggccatcatggtgggcacggggcgcggggcgatcaacggcatcctcatcaagtcggccgaggcgctggaaaccgcccacgacgtgcgcaccgtggtgctggacaagaccggcacggtgaccgagggcgcgccgagcgtcaccgacgtgctggccgcgccgggcgcgagcgaggagcggctgctggagctggcggtgtccgtcgaaggccgctccgagcacccgctcgcgcgcgccgtgtgcgcctacgcccgcgagcgaaaggtgtacccgcttctggtggaggacttcaggcagattcccggcgaaggcgtcgccgcgctcgtggacgaccgcccctcgctcgccggcaacctgcgcatgatggaggcccgcggcatcgagacgggcacgttcgccgaggccgcccggcggctggccgacgagggcaagacgcccttgttcttcgcccaggacggcgagcttctgggcatcgtcgccgtggccgacacggtgaagccctcgagcgccgccgccttggccgtgctgaagggcatgggcatccgcacagtgatgctgaccggcgacaacgagcgcacggccgccgccatccagcgcgaggtgggcgccgacgaggtcatcgccggcgtgctgccggacggcaaggagcgcgagatccgccgcttggctgagcaaggacgcgtggccatggtgggcgacggcatcaacgacgcccccgcgctcgcgcgcgccgacgtcggcatcgccatcggagccggcaccgacgtggccatcgagagcgccgacatcgtgctcatgcgaagcgaccttttagacgtgcccgtctccatccagctttcgcgcgcgacgctgcgcaacatcaagcagaacctgttctgggcgctcgtgtacaacgcagtgtgcatccccgtggccgccggcgcgctgtcgttcatgggcctgaacctcaaccccatgatcgctgcggccgccatgagcctgagctcggtgtgcgtggtaacgaacgccctgcgtctgcgcggctggaagcccgacctccctgcggcaccgtcggacgcccccgcgtccgcgcccatcgacagcaccgagtccgacaaccccaacgaaaaggagagtaccatggagaagaccctgaacgtcgaaggcatgatgtgccagcactgcgtcgcccacgtgaagagggcgctggaaggcgtggagggcgtggaagaggccgtcgtcgacctcgatgccggcaccgccaccgcgaagctcgcgcacgacgtgccggaagacgtgctggccgccgcgatcgtagaggcgggctacgaggtgaagtaggccccgactgtcatcctgagcgcaggcggtgtgtgtcaaggcgagctgcgccctagcagcccacgacgatctcgcgcagagccgccaccagcttctcgttgtcctcgcgcgtgcgcacggcaacgcagaagtagcggctgtcctcgagcgcgggagttccttccagcttgcgcacgaggaacccggccaattgcaggcgctgggccagctcgtcggtgttcgccacgcccagcgccaggtcggggccggcgtcgaacgtgcacatgacgtagttcgcctcggcggggaagatgtcgatgccggggatgaggttgagcatgcactgcagccaggggatctcggagtccaagaactcgcgcgtgcgctcgaggtgctcggtctccgtgagcgccagctcgccgatcacctcggcgaacatcggcacgcacgagctgtcgtaaaagcgcgtgatctgcgcgatggtgtcgggatgcgcgatgcagtagctgatggggatgcccggcatggcgaacggctcgcacagcgagcgcaccaccacgaggttgcggtgctcgttcacgagggataccatgctctcgccgcccagcgtgagctcgatggaccgctcgtcaaccaccacccaggtgcaggcgtcgaggtaggcaagcagcgtcggcttcggcagcaggcggctggtggggtagcccgggttcgccagcacggcggcgtcgaacacgatgccgtggcgctcggccgcggccggatcgggcacggtgaagccggcggggctggcgatctcaaccacgcgatgcccggcatttcctgcggccagcgcgtactccacagggccgggaacggccacacccacggtgcagggctggtaggtctgggctacggcgcgcaccatgtcgcccacggtggagcccacgagaaacgattccacggacaatccgaacttgcgggccagcacgctgcgcagggcgtgagcctcgcggtcgggcgggtagttcagctcgccggcggcgagcgcggtctccatagcgcggatgaaagaagggggcgtgcccaaggggttcgccgtgcccgagaagtcgatccagttcatctccgagcgcatctcgtagggaggagacagcagctgctcgggcagcgcggtcacgcaggctcgtacgctgggaagcgcgtcggtgtctcgctgcgtcatcgtcatgtctctccctccccgcatgttgcctcgtggctcgaggcaaggaatgaatatcctagcacaagttcattacgcccggacagggcatggtagacttattcgcgcaatgcgatcctattcaccacagaccgatcccgaacggcccgccagcggcggcggctacgccatgccgctcgagccgtgggagggcccggccatcctgctcgtggacctcgacgcgttcttcgcctcggtcgagcagctggaccatcccgcctggcgcggcaagcccgtcatcgtgggcggcgacgccgacaagcacggcgtggtgtccacggcgtcctacgaggcgcgcccgtacggcgtgcgcagcgccatgccctcttccacggcgaagcgcctgtgccctcacgccatctggacgcacggccgcttcgaccgctaccgcgagatgtcgaacgccatcatggacatactgcgcgccgaaacgccgcacgtgcagcaggtcagcatcgacgaggcgttcatggatgtgtctcccacgtcggtgaaccgagagcatcccgtgcgcgtcgcgcagcgtatccagcagcgcgtcgaggagctgggcgtcacgtgctccatcggggtgggcacgtcgaagaccgtcgcgaagatagcctcggacatggacaagccgcgcgggctgaccgtggtgtaccccggaggcgagcgggatttcctcgcgcccctgcccgtgcgcacgatgagcggcatcggagccgcagccgaggagaagctgcactcccgcggcatacgcaccctcggccagctggccgatgcggacgaaggaatgctgctgcgcgcgttcggcaagaacggccgcgtcatgcacgtgcgggcgaacgggggcgacgacgcgcccgtggagcaggacgacacggtgaaatcggtgtcgaacgagatgacgttcgcggtggacctcaccacgcgcgaagacgtcgagggcgccatcgccaccatcgccgcgaaggtggggcgccgcctgcgacgcaaggggctgcgcggccgcaccctgggcctgcgcatgcgctacgacgaccgcagcgtgcgctcggtgcagcgtcagctgccggcgcccagcgacgacgagctttcctacacgccgcttctgtaccgcatggccgacgagctgtggcgccccggcatgcccgtgcgcctcatcggcgtggcgatgaccgggttcggcggaggcgaaagcgtgcagggcagcctgttcgacatcgccgaggctgctcccagcgacgacgatgtggaccccgtcatcaaagacgaggcgaagcggcgcggactcatcgaggcaaccgacctcgtcaaggacaagttcggcgaatccgcggtccgcttcggccgcgagctgcgaggcgagggcaacaccaccggctccgccagcaagaacccggccgactacaagtagacattatcaaagcgaagccggacgcaagcgatatgcagccgcgaacccttcgagaaagccggcctgaggaggtcggggcgggcatgccgcgcgcagttccgcacgagccgaagcgtcctgtgaacgcttcgagcgagctcaggactgtttgagcacggcatgtctgccccgacccccaacaggttgaaaaatcgacaatggacgccaggctatcgcttgtcggccaggaagaacagcgccatggtgccaggtcccgaatgggcgccgatgacggggtcgacgtagttgatgacgacctccttcacgccgaagcgctccttcacctcttgggccacgtactcggcgtcctcgaggcaatcgccgtgcgtgatgaacaccatctgctggtcgatgggggcgatggccgtcttctccatgtggtccaccagggcgtgcaacgacttcttgcgtccgcgcaccttctccagggggatgaggcgcccctcgtcgtccacgtgcatgaccggcttgatgttgagcatggtgcccgcccacgccgcggtcttcgacacgcgcccgccgcggaacaggaacatgaggtcgtccacggtgaaccagtgcgccaggttcaacttgtgctgctctacccagtcgcgcacctcgtcgatggaggcgccgcctcgggcgcgctgcacggcgtgccacacgagcaggccttcgccgcccgaggcggccagcgtgtccacggagcgcagcttccgctcggggaactccgcggccagctgcttcaccaggagctcgacggcctcgtaggtacccgacagcccgctggagaagcccaggtacagcacgtcgcgtccctgttccagcagcccgcgcatgagcgcctcggagtcggccaggttcggcagcgacgtggtgatcaccttgccgtcgcgcatcatcgtgtagaactgcttgaggtcggtgtgctgccccttgagatagctttgatactgctcgccgtccaccatgaaggtgaggggcaggatatgcagaccgaattcgtcgatcatgtcctcgacgaggttgcagctggaatcggtgacgatctcgaagttcatcggcatacgacgcgtccttccttgaaactgcagcggtcggaaaaacccgagcttcccgctgtgaatatgcgatcgttaaaagtataccgtttagcgtcgcgctcctgtgtcgcaattttgaaaagtgcgggcaggctcgccggaaacggcgttcgttccactatactatagcggtttatggcgacagaagcgcacatgctttgaggaaaggtacggcacccgtggcgaacacgtacaaagaaacgatgaacctgccgaagaccgacttcgcgatgcgggctaacctgcccgagagcgagccgaagcgtctggccaagtgggaagaagagcatatctacgagcaggttctcgagaagaacaaggacggcaagcccttcatcctgcacgacggccctccgtacgccaacggccccatccatatcggccatgccttcaacaagatcctcaaggacttcgtgaacaagtcccatgcgcagcgcgggttcttcacgccctacgtgcccggctgggactgccacggccagcccatcgagcatatggtggagaagaccctcggccccgacaaaatggccaagatcgaccagcccacgctgcgccgcctctgccgcgaatgggctgagaaatacgtcgacgtgcagcgcgagggcttcaagcgcctcggcgtgaacgccgattgggagcatccgtacctcacgttcacgccgaactacgaggcgggcaacgtcgaggtgttcaagcagatgtacctcgacggcttggtgtaccgcggccgcaaacccatccactggtgcaagcgctgccacacggcgcttgccgaggccgagatcgagtactccgacgagacgtcgccgtccatcttcgtgaagttcaagatggatatcatgcccggcatgttcgagactgcaggcgctgcgggcgacgcctacgtgctcatctggaccaccacgccctggacgcttccggcgaacacggccgtgtcgctggcgcccgacgccgactacgtgatggtccaggcggacggctccaacatgatcatggcgcgcgagctggtggaacaggtggccgagatcgcgggctgggaatcctacgacctcgtgcgcggcgaggacggcgagcccgtcgcgctcaagggccgcgaattcaccggcctcacctacacgtgccccgtccgccaggacctcaagggcaccatcatctacggcgaccacgtcacgctggactccggcacgggcgcggtgcacacggctcccggccatggtcaggacgactacctcgtggcgctggagttcgacgtgccgctgctcatgccggtggacgacaacggcgttctcaccgacgaggcgggccctttcgcgggcctcgacgttgacgaggcgaacccggtcatcatcgaatggctgcgcgaacgcggcacgctggtggcccaaaaggagatcctgcacagctacccgcactgctggcgctgccacgagccggtcatcttccgcgccaccgaccagtggttcgtgtccatggacaagaacagcctgcgcgagaacgcgctcaaggccatcgagaacgacgtcgagtggattcccgcgtgggcttcgaaccgtatcggatccatggtggccgaccgtcccgactggtgcatctcgcgccagcgttcgtggggcgtgcccatccccgtgttcaaatgtgcgaagtgcggctccaccgtggcgaacgagcagacattcgacgcggtgatcgacctgttctaccgcgagggcgccgacgcgtggttcacgcgcgagccgtccgagtacctgccgcgcggcgtgaaatgcgagacgtgcggctgcaccgagctgacccccgagaaggacatcctcgacgtgtggtgggagagcggcgtgtcgcacaccagcgtgttgaagcatcgcgaggccgagggtctgcgcttcccggccgacatgtacctggaaggctccgaccagcaccgcggctggttccagtcgtcgctgctcactagcatgggcgcgtacggcgtgccgccgtacaaagccgtcatgcactgcggcttcaccgtggacggcgaaggccgcaagatgtcgaaatcgctgggcaacggcgtggatccggccgaggtcatggcgaagagcggcgccgacgtgctgcgcctgtgggtggccagcgtcgattactcgcaggacgtgagcatctccgacgagatcctccaacgcacctccgaggcgtaccgccgcatccgcaacacgttccgcttcttgctgggcagcctggacgacttcgacgatcagaaggacgccgtgtccgattggaacgcgctcgagcccctcgaccagtgggccatggtgcgcacgaagcacctgctggacgacgtgagcgccgcctacgacgcgtacaagttccactatgtgtaccgcgccgtgtacgactacattgtgaacgacctgtcggccgtgtacatggacgcgacgaaggaccgcctgtactccgaggcgcctgactcgccgcgccgccgcgccgtgcagacggtactgatgaacatcctcgaggtgctcgtgcgcgtgctggcgccggtgctctcgttcaccaccgacgaggtgtgggagcactacccccaggccatgcgcgagcgcgcaggccgcccgacgaacgtgcagctggccggttggcccaaggcgtccgacttcgcgcccgccatccccgcggacggggagcgcgtgtccgaggacttcggcgtgatcatgggcgtgcgcgaagtcgtgaccaaggcgctcgaggacgcgcgcggccagaaggtcgtgaacaagagccaggaggcggccgtcgtcgtgaccgcgccccgcgccgtgctcgacgcggtggagcgctatgacgcggcggtgttcgaggagctgttcatcgtggcgtccgtgtcgttcgccgaaggcgaggagctggcggcgacggtttcgaagaccgaggccgagaaatgcccgcgctgctggaaccaccgtgcgctcggcggcaacgcgaaccacggatccgtctgcgagcgctgcggcgatgcgctcgacgccatcggcttcgcggaaggggaataggttcttggatacggaatcgcccgacaagcagccctcctcgcgtcgtcccgaacgaccggagcgggtcgatggaatcgatgcggcctcgtccgaaagcgttccgaccctttcggacgagcgaggcgattcgaaggaagccgccttttcggaggaagaagcccggcaattgaaggccgatcgctcgcgtcacacgcttgtgttcggcatcgtcgtgcttgcatggctcgctctcgacaccctcacgaagaactacttcaacggctcgtattccatgggggaggtgatcacgggcccgttgctcggcctcgtgcggttccacctcgttcacaacacgggtgcggcttggggcatgttcggcgactccacgttccttctgggcgttatgtcgctgatcgtatgcgtgctgctcacggtgtatctgttcttcctagcgtatcgtcccaacatcgtgcaggtggtgggcgcggcgctcgtggtggcgggcggcctcggcaacgcgttcgatcgcttcgcgttaggctacgtcgtggacttcatcgagccggtgttcatcgacttccccgtgttcaacgtggctgatattggcgtgacatgcggattcgtgctattccttgtcggcgttatcgtcagctggcgccacgaggatcgcctatccgcagagcttgccgcgtccgacggcgaaggcgaaggaaccgacgcgcgatgagccgcatgttgagctacgtcgcagcacccgacgacgcgggtcagcgcctcgatgcgcttttggccgcgcgcggtctgtatcccagccgtagcgcggctgcgcgcgcggtggacgacggcctcgtgttcgtgaacggcgcggaggttgcgaagaagcatcccgtggcgccgggcgacacgatcgtgtaccaggttgaggagccggtagagcccggccctttgcgcggccaacccatcgatctggacatacgcttcgaggacgaagacctcatcgtgctgtcgaagcaggtggggctcgtgtgccatccgtcggtcgaccatgacgacggcacgctggtgaacgccctcatctaccactgcggcgccgagaacctgtgcaacgtgcagggcgaggacgaccgtctgggcatcgtgcaccgcctcgaccgcgacacgagcggcctcatgctggcggcgaagaacgacgagacgggctatgccctcatgtcggacatccgcgatcgcgcggtcgaccgacgttacctggcgctcgtgcacggcgtgatcgcccacgacaccggtatgatcgacgctcccatcgcgcgcgccgagaaggagcgcacgcgcatggccgtccgcgacacgccgtcggctcgcgaggccatcacgacgtttcgggtgctcgagcgcttcgagcacggggggcgcgacgacggctacacgctcatcgactgcaagctgttcacagggcgcacccatcagatacgcgtgcatctggagtacgcgaagcaccctcttgtgggcgacccggcgtacacgtcgggcgcgccgagcgcgcctgcggccgacctcggcctcgaccgccagttcctgcactcgttccagctgtcgttccagcatcccgtcacgggggagggcctgcgcttcgcggacaacctgccctccgacctgcaggaagcgctcgacgacctcgcctcccgcagcacgggccgcacgacggcgggggaggaagtgcgagcgttgctggaaggcgccccgaggccgcggctgtagcctatcccttcccgtacacgctcatgttctgcatgcgggattgcaggtagctgtcggggaagtgctcgtcgaagaaccgctgttcccacgtggtggcgggcacgcccgcggcgcgctgcccctcgcggtcgagcgcgagcagggtgacggcgatgttcagcgccataaacaggctgagcgccgcggtgaccaggcgtgcgagcatgctcctggcatccacgtgcgagaacacccgcttgatgaacggcaggatcgtgcgcacccacacgaggcccagaagcccccacatcacgccgaacgcgaagttcgtgcggccgttgatgctgccgaacgtgccggtatagtcccaggcgatggcgccccacagcacctccatgagccagctcgtcgcgtactccatcaccgagcccagcagcatggctatgaggaagatgatgaggttgtgcgagtggtagaagcggttgagcgacaccgtgagcaccaccgcacccacgccgtatatgggcgagaacgggccccacacgaggccggcgcggctttcgtagccgccgtacacgatggcgtggaacaccgtctccactacgaggccgaacacgctgcctgcgacgaacagccagaacagcgtgaagtagtcgatcttgaggtatccctggttcggacggacctgctcgcgcgcctctttgccgatctcgcggaggatgcccggatgcggttcggggctttcgcagggggaggagccggcttcgggttcccgatcggacgtttcggcctgtcgcgacgtcgattccacagccgattttttcggttctttctccattcacctgccctgtcgatagtcaatgggctaaactataacagattttccagggcggaattcaaccgtttcgtcatgtctactccgcaggaaggtgatgaacatcgtgccagaggggaagcgctcgggggtgctcctagtgaacaccggcacgcctaccgtgcccaagccccgcgccgtgcggaaatatctcgccaagttcttgatggacaagcgcatcgcgccgatgaaccgggcaggatggtggttcgtcctccatctgttcatcctcccgaagcggggacgcgcgtctgccgagaaataccagaagatctggaccgacgaaggatcgccgttcaccatcgcccatcagaagctggaggccggcctgggggccgcgttcgaggacgaggggctggacgttgcggtgcgctgcgccatgagctacagcgacccgtcggtgctcgattgcgtgcgcgagctcaagggcgcgggctgcacgcgtctcatcgtgcttccgctgtacccgcaaagcgcctactcgaccaccggctctgtgtccgacagcgtggagcgcgcgctcaagaaggcgcgttgggacgtgccgtgcgacttcgtcgacaactaccacgacgaccccacctacatccgcgccatcgctgcgtccatcgagcatgccggtttcaaggtggactctgacgataaagtgctgttctcgtaccattccatcccgctcgtggacatcgaggcgggggacacctacgagctgcagacgggcgccaccagcttgcaggtggccagcgagctgggcatcgaccgcaaccgctggaccatcggctaccagtgccgtttcgacaagggccgcgaatggctctccccgtacacgcgcgacgtgctgacgcgctgggcggaaaccggagtgggacgcgtgttcttcatctgcccgaacttcgccgtcgattgtttggagacgctctacgacatcgaccacgagctcaagccgttttatttcgaccagatcaagcaggcgggccgcacgcccggtgaggaaagcttcacgtacgtgccctgcctcgaccgcagccgcgcgcaccttcgagcgctttccgacgtgctgcgcccgcatatagaggagggctctcgtgactaacgtgaacgaaggcgcggcaaaccccgcgcagaagaccgtgcttttgggcgtgacggggtgcattgccgcctacaaatcgtgcgagatcgtgcggggcctgcagaaggcgggcgtgcgcgtgaaggtggtcatgaccgagcatgccaccgagttcgtgggacccacgacgttccgcgcgctcacgcacgagacggtggccgtgggcctgttcgacgacccgtccgaccccatccaccacgtgtcgctcgcgcaggaggccgacgtgttcctcatcgcgccgtgcaccgcgaacgtcatcgccaagatcgcgaacggcatcgccgacgacctcttgaccaccacggcgctggccaccaccgcgccgctcgtcatagcgccggccatgaacgtgaacatgtacgagaacggtgccacacgctacaacataggcaagctgcatatccgcggcgcgcgcttcatcgatgcaggcgacggctacctggcgtgcggcgacatcggcaagggccggttggccgaggtggacgacatcgtgtcggcaacgctggacgagctgggcgtgaagcgcgacctggccgggcgccgtgtcatgatcaccgcgggccccacggttgagcccatcgacccggttcgctacatctcgaaccactcctccggcaagaccggctacgctctcgcccgcgctgcggctcttcgcggagccgacgtgacgcttatttcgggacccgtgtcgctgcccgccccgcaaggcgtgcatatggtgcacgtgaagacggcgcgcgacatgttcacggcggccgaggacgctttcgaagacgccgatatcgccatcttcgcggcggcggtggcggacatgcgtccgcgcgaggcggccgggcataagctgaagaagggcatcgccgacgccgagctgggcaccatcgacctcgtcgagaacccggacatcctggccacgctgggcgagcgcaaggagcagcaggtggtggtgggcttcgccgccgagacgaacgacgtggtggcgaacgccgagaagaagctcgtatccaagcacgccgatctggtggtcgctaacgaagtgggaggcggccgcgcgttcggtgccgacgacaacgtggtatggttcgtggacgatcaggacgtcgaggagcttccccgcatgtccaagactcgcctcgccgacgagattctcaacaaggccatgcagttcctggcgtaggaacggatgcagggcgccttggaccggcgccctgcatcttgcggcggccctgctctaggatgccgcctcttcgcagcacttctgcacggcggtgaggaacgcttgcgacgtgcgcgtcgccccggcgacggtgtcgacctgcacgtcttgggcttggatgacggccggtatcaagacgtcctccatagccgcctgcccgacgtagggagtttcgagctcgctttcctgggcgatcgcggcgatcgatcctccttcgatggtcacttccaccgtgatgtcgctgaacatgccgaactcggtgtcgcggtacgtgccgtctttgagcgtcccctgcggcatggaccaggcggcttccaagacggatggggacgtgtctccctccgaagttaccgatcccttgcgcgacgagcctatgtaggcggcggcgaagcggctggcgaagcggcccgagttgatgttgttcgcgttcgtgccgcccgggacattgatcgtgtagatgttgggccacaggtcggccgagtcgacgccggccgaatagaggccgggtatcggcttgcccgctttgtcgacgacctccatcttgcggttcgtgcgaatgcctccgaacgtcaccatgcacgattgcggcatgtagcagaaatagaagggcgggttgtcgagcttctgcatatactcgctcggcttcccgaaataggcgtcgtcgcccttgtcgcacatgtcgttgtagtcggcgatcgaggcgagcacggtgtccagatccagcccgaacgcgtcgcatgccttcttcgccagctcctcgagcgtgtcggcgctgaagaagtcgtcgtgggggttctcccgtatgcgctgcgcaagctcctcctgggtggcttcccaatcgaggcgaggggctatcatgccgtcgtaggcatccttgaacaccttggcgtcgtagatcgagtagagccgttggtgcgcgagcgaggggatcatgtcgctcatccagttgtcgacgccggccgattcggcgcagaagcgctggccgtcctcgttgatccacagcgagcagggattgtggcctgccaccaccagcccgtctccgcggccgtacgtgccgtattcgccgccgggggcgcctgacacggtcaactgcatcaagcccgacatacgcggtatgttgctggctccgccggcttcaagcgccatgcgcaccccgtcgccgtcgtagccgtagaggaaccgcttgacgttcgtcgtgtccgagaagcctccttcttggagatactcgtcgttgttggcgaaaccgcccgtggccaagaccaccgctttcgcgttcacctggacgtagtccccgttgagcttcttcgcgtacaccccgttcacggaaccgtcgccgcctttgattagctctatggccgggcagttcatgaggaactccacgccgagttccttcgccttcgaggtcatcgcgggcgagaagtcgtcgtgggctcggttttcgccgaaccagtggaacgtctcgaacttgccgccgtgataatcgtcgaccacgccggtgaagttgaccccgcattccttgagccaggcgatgttctcgcccgaagcctgaacaaggtcgaaccacttcaagccgttggctcgattgtgggagtattccatctcggtggatatgatctcggcgggctcgatggagatcccggccgcttgctgcatctccgaattgacagcgaacacgccttcggtgccgatgccgccgcctcccgttcctccctgcttttccaggaccactacgccgagcccttgctgggcggcctcgacggcggcggaaagcccggagttgccggcgccgcagatgcagatgtcgcagtcgtaggtagccactgcgtcgaacgtcttggtgcgggcgcccttctcgtcctggggcgcatcctgctgcgatccgcccgtgttcgcgctcgtcggcgcgcaccctgccaaacccgcccctgcgatcaagcccgcggttccggcgatgccgagaaagctccttcttgtcagatccatgatgcctccttttcgaatccctcctgagaacttgcggcgaagcgcagatcctacgggaattctatcgtcgcgtacgctgcgcagccatcacccgccataggtagaatccgtgcggactgcgcgagaattacccgtaacgggtaaggcctcgaatgcaaagtggggtatgatctgagaaccgtaggggaggggaaccgtatggaagcaggaatcctgtctttgaaggaaaagccgcaggaggacaagctgccgcattacagctcgtatcacgccatgggcattctgctggcgctggtgggcatgagcgcccagtggtcctttctgcattcgatcacgtttttggggagcgtgatcggcgtgcagtccgaagtcgagccgggcagcgcgtggatcgccaactctttgggcacgttcaccgtgttcttgctgatcttcgcgctctctcgccgaataaccccgcttctggagaagcgcgctctgtatccggcagcagcgctatgcctggtcggcggcatcgcgctgctgctcgtcgggaacctgctcttttcgtcgccagcatgcaactatgcgggcaacgtgctcgtggcgtgcggggccacgcccctgatcatcatgtggggcgagctgtacaagtacctcgatcccaaaggcgagcagctgttggtgacgctttcggccgcgacgctcgccgtcgtcgcgtatcttgtcgagatactgcttcccgcgccgttgtccgtggcgatgttcgcgatgctgcccctcgtgtccctggggagcctcgccggcgcgcgaagcaggttggtcggctcctcgggggcatggcgcgcgaaaggggattccgcgaatcgcaagtcgcccgcgctgttcttcgtctgcatcgccgtgttctccattccgtacaactacctccgcaatgcggacgggttgcaggcggtgtatgcgagcgccgtcgaatggccgagcgtgcttgcagtcgcggccgtggcgctggcgctcatcgccctggccgagactgcggcggagcgtcggggcattctgctcgttcccggcttcgtgctctgcctcctcagtgcggccatggtcacgtacctgctcgcgcgcgacgattacgccttcgcagttcccagcctgctgtacacgggatactacttgttcctggcgatggtgtatttagccctcgggcccatcgcggccacgaccgacgcgaatccgacgcgcctgttctccagcgccatgctcgccaacgtaggaggactgctgctagggtcgatcatcgcgggaaccgagcggtggttcggagcacaaggcacggccctcaccgtgctcgctgtgacgtatgccttgctcgtcgcgggtttcctgctgttgggaagcaagtcgtacagcctttttcgcgtgaacaacttcgacgaggaggaatactcgttcgagtacgtcgcacccgtgaaggcgagggtcgtcgaggcctcttccgaagaaggcgcgcgtcaggagagccgcgagccttcgctggcgtcagctatcgcgcgccaatgcgcgacggtgagcgcgcggtatcggctgagcgggcgcgagcgggaagtgcttgccgagcttgcacgagcgcgcaccatcgcgtctattgcggaagagctcgtcgtgtccgagaacaccatcaaggctcatacgaaatcgatctaccggaagctcggcgtccatacgcgcgaagagcttttgcatcgcatcgaggaatctgagagggaaggcaaaataccttgaagtaatgtcttgcaaagccggcaggttaccgttaagatagtcaacgctgtttgggaagctcgcaagagcaaccgggcaagcacaacgggttgtggcgcagtttggtagcgcacttgactgggggtcaaggggtcgcaggttcaaatcctgtcaacccgaccagcaacttagagcaggtcatcggagaaaccggtggcctgcttttttatgctcagcggcgtgaacgcatcccatcggaagcgttgacacttccgatgggatgcgtggcgacttgtggtcatcgtgtgacgaacgctgagaaggccggatagcaatcggtgaacggtaggcgcgataatcctgcatgaaacgcaccttacgattctgttttctgcatggtgcgcgcagggggttccaaaattggcggcgagcggtctgatgcgtgcgttaccgttggttggaaatcttcgcgtaaacgttttgtgcatctgcacaaaacgttatactacagccctccgaatacggagcgctccttaaggagcgtacagcgaagcccccaaaaggaggatacgatcaatggctgataacgtagtattggctcgtaacacggacgaggcccctcagaacgaccgttttgcgcagaccgtggcgttctcgcactacaacaacatctcggctcagctccccatcgacccggagaccggcgccatcgtcgagggcggcatcttcgagcaggccgagcagtgcttcgagaacctcgaggccatcgtcgagagcatcgaccactcgctgaacgacgtcgcgaggatcaccgtcttcgtgcgcgacatccgcgacatggacgtggtcgacgaggtgtaccgcgccttcttcaccacgtatcttcctgcccgcacggttatggctgttgcggcgctgcccatggacgcgctcgtgcaggtggaggcgctcatcaccaacggtgagggcaccatcccgaacgagccccaggccggcgacctcgtcaagtacgtgaacaacacgcacaacgctccttacgacgccctgtccacgcagaccgtggcgttctcgcactacaacaacatctcggctcagctccccatcgaccccgtgtcgaaccagatcgtggtcggcggcgtcgccgagcaggccgctcagtgcctcaagaacatcaaggctgtcctcacgagcatcgacgtcccgttcgatgacatcgtgaaggtcaccgtcttcctgaagaacctctccgacatcgatgccgtgaacgaagtgtacacgcgcttcttccccgattcgggcatcgcccgcgccgtggcctacatgccggcccgcaccgtggtcgaggttgccgagctgccgatgcacgcgctcgtgcagatcgaggccgtcgtgtcgcacggcgacggcaccccgccgcaggaagtggaggcccgtcacggcctgatcatcgaggccaacgacacggacgctgctccggtgagcccgctgtcctcgcagagcgtcgcgttctcgcactacaacaacatctcggcgcagctgggcgtcgacgccgcgtcgggcaagctcgtcgctggcggcgttgccgagcaggccgagcaggcatgcaagaacatcaaggccatcatcgagaacgtcggccacgtgatggaagacgccgtcaaggtgaacgtctacctgaagaacatcgacgacctcgctgccgtcgaggacgtgtgcgcccgctacttcaccggcacccctgcgttccgcgccgtcggcaccgctgcgctgcccatggacgcgctcgtgcagatcgacgccatcttcggcaacgccgagggcaccccgccgatcaagtagctcgcctgagcatcggatgaacgaaaaggctggagatcgatctccagcctttttttgcgtcgagaatacatgcttccgtcggcgcagtcctcgtggccgcgaccttgcccttgcctggacatcatcatcgctccgaaaacacgcctcgtgcgctgaggcgtgttttcggagcgatgatgatgtccgtcggcgtcacgccgctcacggggcggcatccaaccgactacaggctgcatacggctttctggtcaggctgttctaagcgcaacgctcgtctatcctcgtcagcatcacctatgagcttcgaggaaaggaactgctatgagcatcatcgtatggatcatcatcggcggcttggccggttggatcgcgaacatgatcatgaagacggacggcagcctcgtcaagaacatcgtgacgggcatcgtcggtgcgctgatcggcggtttcgtcatgagcttcttcggcgccgcgggattcaccgggttcaacctctggtcgttcttggtggcgttgataggctcgatcattctcatcgccgtcatcaacctgctgaccggcaagcgcgcctagcgacgttgtgcgcacgagccgaaagcggggcggcggtcctctttcgggacgaagcggccgggatcgaacgttcccggccgcttcgcgtttttcacggcatcgggatttcaacgcctccgaccgtgacggacttcacctggtcgaggtcgaggattttgtcgaacgccatagacttgtcggtgaccgtcgtctgctcccgcacctcgactccgccgccggctttcctcgtcgcgtcgatgacggtgccgtccttcatgttcaccgtcaagggcaagtattgcaagcgctttgattgcggcgtatcgaagccgatcacgttcacctcaattggaaagtcgatcgtgagatcgaccgacaaacttaacggcgagatcatgatcgcgttgatcgtagcggtgccttcatcaaacgcgaaggtctggccagccggtagatcgacggaaaggtcggcgcaatcggcgacgaaatccatcttccaagcgccttccacgagggtgcgcgcctcgccgtcctcatcgaacgccaagaggtcgtgcagcttcacgtacacgtcttttccaacgaagctggttcctccgtgcgtatcgatggtgctcgctttgacgaactggatggcgttgtcgtgggggtcggcgtcgaagaagtacgagacggtgccccgtgacggcgcgtcgtcgacggttacggtggcgaggttttcgaacctcagcgccagcgtgccgtcctggttttcccggatcccctcgaacggggtgccgtcgtccttggcgatggagaacacgatggcgtagttcgaccggtctcccatgacggcttcggcggtgacggtcacgccatccgacgacgcgtgcgcgtcgggacgcccgatcccgtcgaccacttcggtcgtagccggcgtttccttcgccggcgcgctcgctcggccgagcattcccgatgcgtacgccgtgcagcctactgccagggccagcacggctgcggctgcggctatcacaagggcgcgcgagcgccgtgtcggacggggaaggggctctacgacggcggcaacttcgatgcgctgcaccatgcgtcgcttggcctcgggcgagaaccgcagctcgtcgagggcttccttgtattcatcgatcatcgtccgctccttccaacagggcgcgcagcttcttgcgtccgcggctcaggcgggccgccacggcgtcctcggtgccgcccgtcatgtccgcgatctcgcgcgcggtgtagccctcgtagtagtgcaggtacagggcctcccgaaacggctgcgacagctccatcaccgcttcgagtacggcgctgtcgggaacctcgggcgcggccgcctccgcgacggcgtcgagcgccaccgacgtgcggcgtcgcgcgctgcgcaacacgtccttgcaggcgttcgccgtcgcgcgcacgatccaggcgcgctcgtgctcggcgctctcgaaggcgcgatcggtctgcagcaacttgatcagcacgttctggcagacgtcctcggcgtcgtgtgtggatttgagatacgtgtagccaagtcgcaggatgaggtcggcgtacgtctgcacgagccgctgcgcctcggtatcgggttgtcgtttgcgcatagagtccgttcctgtcgttcttcgggcaacgccgtttcacctgcaatacgaacgagcagggcgaatcctgacagcgcgggcgaatcttctaggagaattcccaaaaatcctggataagctccttgcggttagcccgctcggccttctggaggatatggtgcatgtgcaccttgacggtgctcggcgcaagatgcatggatgtggcgatgttctggttgtccttgcccagcagcacgagtcgcagcacctcggcctcgcgcttcgacaactgtcgcgcggccgcgtaggctgcgagattctggtcgatgaacgtctcgagcgatgcgcctccctgcgtgggcggttcggtgcgtcgtagcgacaggctgcgccacgcgctcgtgcaggcggcgaagccgcagcacagcacgagcgcgttctcggcgaagttgcgctcggggaagaagggcagcctctgacctgcgatcgcatgcgggtcgacgaccagcaggaacacgacgttctcaagcaggacgcaggtgacgagcgcccatagcgcgccgtacagagcacgatggcgccgcatgcgaagccgtaacacgtcgtcgcgcgtgccgatgtagcgggcggcgaggtagacgagcatcgcgtacagcatggcctcgcgcatgctgtagaacaggaacatctggccgttgccctcgggtgcgagcagaagcacggcgaagcttgtcagcacgaacgccgcacccgggatccagcgtaccgccggcctatcctcctccaggtactcgcacagcacgagccagaacgatatgagcgcgccgccgccgacgaggacggaagcgacagggctgccgatgaagaagggcgagacggacgcgtcggaggctcgctgcatgaggaaatcgtcctggaacacgagcgccacatcgaagaagtagaacaggaacccggcgaacgcgtagcggtaggtcttgttgcgcgtcaccaggtacgacgcgaggcacgtcgccgccgttaggatgacggccaaaagcacgatgagcgtgtagtagaaaagacccagtcccagatccatgcgcttcctcgttcgcagtcgccggcctcgcgcccaagcgggcgcacatctcgaacagtatagacgattcgccgcaacgcgccagatcaaacggctctacacccgaaatacacccgctcctaccaccagattaggactgcccgcgcgctcgttcgcgcgacacgatgaagacaacgtccggaacgtgccgaacgaaacgacgaaggtagatgaaaggggacaagcgcatgtcgacggaagccgtactgcccaccagcaccgcctcgcccaaggaaggcccgcctaagaagaagaggaagctcagcttccccaccgccttcaccatcctgttcgcgctcaccatcgtcgcggtggcggctacatggttcgtgccggcgggccagtacgcgaagctcgcgtacaacgccgacgcgggcacgctgcagatcacgagcccccagggcgcggtgagcgaagagcccgccacgcaggagacgctcgacgctatcggcgtgaacatcgggatcgaccagttcacctcgggcgcgctgtcaaagcccatctcggttcccaacacgtacgagcgcctggagcagcagcccaaaggtctcgccgacatcacggtgagcatggtgtcgggcacggtggaggccgccgacatcatggtgttcatcctcgtgctgggcggccttatcggcgtggtgaacgcgagcggcgcgttcgagtcgggcctcatggcactcacgaagaagacgaagggccatgagttcctgctcgtgttcctcgtgagcgccctcatggtcctcggcggcaccacgtgcggtctcgaagaagaggccgtcgccttctatcccatcctcgtgcctatattcctggcgctcggctacgattccatcatctgcgtcggcgccattttcctggcaggttccatgggcacgacgttctccaccatcaacccgttctcggtggtcatcgcctcgaacgccgcaggcgtgaacttcacgcagggcatcgaatggcgtatcgcgggatgcgtcgtgggcgccatcgtggtcatcgcctacctgtactggtacagccgcaagatcaaggcggatccgacgttctcctacacctacgaggaccgtgagaagttcgcgaagctgtacaacgtggaggcgggggagacgaaggaggcgcgcgcgaccggcttcacgcttaagaagaaggcaatcctcgtgctgttcgtggcggcgttccccatcatggtgtggggcgtcgtgagccagggctggtggttcccgcagatggcagcctcgttcctggccatcgcgatcatcatcatgttcctgtcgggcatcgccgagaagaaggtggtggatgcgttcatccacggagcgtcaagcctggtgggcgtgtcgctcattatcgggctcgcgcgcggcatcaacctgatcatggagcaggggctcatctccgacacgctgctgttctggtcgtcggggctcgtgcatggcatgaccggacctgtcttcatcctggtcatgatgctgatcttcttcctgctgggcttcgtggtgccgtcgtcatcgggtttggccgtgctgtccatgcccatcatggcgccgctggccgacaccgtgggcatcccgcgctcggtggtggtgtgcgcctaccagtggggccaatacgccatgctgtacctcgcgcccaccggcctcgtgctggccacgctcacgatgttggacatgaagtactccaagtggctcaagttcgtgtggcccatggtgctgttcgtgctcatcttcggcggcatcctgctggtcgcccaagtcctcgtctacggcgccgcctgatctgctggttgttctcggcaggcggcttgcgtatactggcaaggatcgggatgacccgatccttgccaggcgtcgagcccctcgcaggctgctccgccgcaagcccgtctgccgggacaacccgggaaaccatcgagcatgcggcccatccgacggcccgcttcgcgcggcgccgaacggcgggccgcatgctcgcgcacgtatggagcgaagaatcatgcacggaaccgaagaggctttggacggcgagggcgtcgtcgccgagatcgcaccgaagtcgagaagcgatcggaagatcgaccgtttgggcactgagagcaccttcaagctgcttctggagttctccatcccggcggtggcgggcatgctcgtgcagatgctgtacaacgtcatcgatgcggtatacgtgggacatgcggtaggcgccgacggcctggccgccaccacggtcgcgaatcccatgatgacggccatggtggccgtggccatgctcgtgggcgtgggcggcaacgcgctggcggcgatcaagctgggcgagcgcaagaagggcgtggcggaacgcgtgatgggcaacagcttcgtgctgctgctgatcgccacggcggtgctgtggggcatcgccatcttcgcgctcgagcccatccttcgctactcgggcgccgacggctccgtgctgccgctcgcgctcgacttcatgacggtgatcgtggcaggctgcccgctgcagttcatcgcgttcggcatgaacaacttcatccgcacggcagggcaccccaaccgagcgctgggctccatgctcgtcggaacgggcgcgaacgtggtgctgggctacctgttcatcatcgtgctcgacggcggcatgcgcggcgccgggctggccaccgtgtgctcatgggcgctgtcggctctgttcgtgatgcagttcttcctcaagaagggctcacccatgcctttgcgccgtccgtcgctgtcgctcgacccgcgcatcgcgctgcgcgtctgcgccctcggaatcgctccgtgcgtcacgcaactgggcttcgccgtgtcgtctatgatagagaacaacctgttggtgctgtacggtgccgccgatgcgctcggcgtggacggagcgcttgcggtgatgcgcgtgctgtcggccgtgggcctgttcacgttcatgccggccatgggcatcgccatgggggcgcaacctatcgtgggctacaactacggcgctcgcgcttacggccgcatgaagctcgtgctcgtgcaggccatagtgctgggtatcgccatcacgacgcctttgtgggcaacggtcgtcctcgcacccgacctgtacgcgcacttgttcggcttgcccgagatatatatgaaggaaacggcttgggcgcttgtgctgtacctcatgttcattcccatcctgcctattcagaccatcggctcgaactacttcgacgccacaggccaggcggcgaaagcgaccgtgctcacgctcacgcgccagatcctgttccttattccgctgctcgtgttctgcccgctcgttctgccgcaggtgctgcccatcacggcgcttgagagcgtgtggctggcgccctcgatatccgatataacatccacgctcatcgtaagcggttttctcgccttcgaatggcggcgcctgcgcgctgcggaagcgggggagggctcgaatggcctccatcgagcctagcggctcgagccgttccctcgtgttttgtgtgcgtgcacaatgaaataacggtcgggtaacggagaagaagcggctcgtcaatgcgaaaccgtttgccttcaacgtctcgccgctgatcgaatccgtgttcgccgttggctcccttttaccgagcaatcgcctccggaggggccatgtcatccgaccgtttacttttctctggtagagtggcctggcgggcgatatcgctcgcttttattgttcaagtgcaatcggtaaaggtaaagggggaagctacgtggctatgctcgggtttttaatccttttcccgctggttgttgccggcgttctgcttgtcgtgcgcaacaaccgagcgagaaacgtgattgtgggagcctccgcgctcgtcatcgggttagcgtcggtgtggctcgtcgtgtcctatctgggagctccgtggataacgtatgatttctactccccggtggtcgactacgtctgcatggccgtcagcgtgctcatcgctgccgccatcttgtacttcggcattaagtacaagaacttgtgggcttgcgtgctcgcagccgtccaggtggtcggctcgcttgtgttcgagttcggtttcgcccacgacgtcctcgtgaccgaagggctgtacctcgactcgctgtcgctgctcatggcgtttatcatcggcgtcatcggctccggcatctgcgtgtacgctctcggttacatggaagacttccaggcgcacgagccggaaggcgcgaaggaccgccggccgacgttcttcgccctcatgttcgtctttctggcggccatgttcctcatcgtgttctcgaacaacatgctgtggctgttcaccggctgggagatcaccacggtgtgctccttcctcctcatcggcttcacccgtaccgaggaggccatcaagaacgccttccgccagattatcatgaacctgctgggcggcatcgccttcctggcggccttgtacgtcatggccatccagttcaacacgctgtcgttcctcgagttcctgcagatcggcatcgccaaccccggcatggtcgtgctgccggtcacggcgctcgcgttcgccggcctcaccaaggctgcgcagatgccgttccacacgtggctcctcggcgccatggtggcgcccactcccacgtccgcgctgctgcactcttcgaccatggtgaaggcgggcgtcttcttgctcatcaagctggcgcccatcatgatggcgtgtcccgttccgtccgtcatggtcatcctcgttggcggcctcacgttcttgttctgctcgttcatggccatctcgcagtcgaacgccaagcgcgtgctggcgtactccaccatcgcgaacctcggcttgatcgtggcctgtgcgggcgttggcacgcccgaggcggtctgggccgcggccttcctcgtgctgttccacgctatcgcgaagtcgctgctgttcctgtgcgtcggcaccgccgagcaccatatcggcagccgcgacatcgaggacatggacctgttgttcgagcgcatgccgcgtctagcccgcttcatgatgctgggtatcctgtgcatgttcatcgccccgttcggcatgctgctggccaagtgggccacgctcgtctccttcgcggataccggtcaggtggcgctcatcgtgcttctggcgttcggctccgcggccacgttcatgttctgggcgaagtggctgggcaagctttccggcatcgccgctcgtcccgagaacgtcgaggccaaggtgcattccagcgagtgggtggccatcatggtcatggccgtgctcgtcatcctgtgctgcattggactgcccatcatctcgtgggctgtggtggaaccgtacatctacagcgtgttcggcaccgtgggccaggacatctcgtcgtccaacctgtggatcgcctccatcctgtcggcgttcatcgccgtggtcctgttcgccggactcggccgctcgaaggccaagaaggtcgacatctacctggcaggcgtgagccgcgacaacgccgagcgcacgttctccaactcgctgtcgggcgaatccaccgcatcggcgcgcaactggtacctcgagggcatcttcggcgagaagcgcttgtcgccgttcggcaccgcgtgctgcaccgtcatcatcgtgatcgcattcgcggcggcggccgtgggcgttccgggattgttctaggaaagggtgtgatctgacatgacaatgctcttcgctcttatcggcaccctcgtcttcgccatcgtcgcgccggttctgggatgcctactcgctggcctcgaccgcaagatctcggctcgtatgcagggtcgcgtgggacccccgctgttgcagccgtactacgatgtccgcaagctcatcgagaaggataacgtgtcggtgaactccaccgagggcacctacatcacgtgcgccctcgtgttcaccctcatcgccggcggcatcttcttctccggcggcaacctgctgatgagcgtgttcgtgatcacgctgtcgggcctgttcttcatcgtggccgcgtactccacgcgctcgccgtacgccgagatcggcgcgaaccgcgagacgctgcaggtcatggcgtacgagcccatggtgctgttcatggccgtggcgttctacatggcggccggaaccttcaactccgcaggcgtgttcttcctcgacgcgcccctagtgaccaatatctggctcgtattcctgggctttttgttcgtgctcaccatcaagctgcgcaagtcgccgttcgacctgtcgtactcgcatcatgcgcatcaggagatcgtcaagggcatcaccaccgagatgagcggcaagacgctggcgaaggtggagatcatgcactggtgcgagaacgtgctgttcctcggctggaccgcgctgttcttcctttggggcaacccgctgtccatcgtgctggcgctcgtggtagtggtgctcgtgtacttccttgagatctggatcgacaacaacttcgctcgcgtgaagtggcaggccctgctggcatcggcgtggggcgtggccctcgtcgcgggcggcgtgaacatcgcgttcttggcctacctgtaaaggagctgcacctatgacgtatgcaaccaaatcaccgtgggtcatccactacgacggttccagctgcaacggctgcgacatcgaagtgctggccgcgctgtgccccgggttcgatgtggagcgcttcggcatcatcaacacgggcaatcccaagcacgccgacatcttcctcgtcacgggcagcgtgaacgagcagaacatcggcgtggtccaggagatctacaaccagatggtcgagccgaaggtggtcatcgcgtgcggcatctgcgcatgctcggccggcatcttccacgactgctacaacgtgatcggcggcgtcgaccaggccatccccgtggacgtgtacgcgcctggctgcgccgtgcgtcccgaagccatcatcgatgcggtcgtgcagggactcggtatcctggaagaaaaatcgaaagccctgcaggcgcaaaagaaaggggcgtgagaaacgtgaccctgcaatcggaattcatcccgctcaccatcgagggcctgccggcgcttgcagcggaaaagaaggcggaaggcgcgcgcttcgtgcagatgctgtgcgtgaacaccgaggaaggcatcgatctcgtgtactcgttcatgaaggacggcgtgctgacgaaccatgagatcaaaggcgtgaagaagggcacgaccgtacccagcgtcaccgatcagttcctggcggcgttcgtgttcgagaacgaggcgcacgatctgttcggcgtggacatcgagggcatcgccatcgacttcggcggcaacttctacgcgctcgcgcagaaagagcccatgaccatcatctcgccggagcagaaggcggctcgcgagaaggcgaggaaggtggccgaggcgaaagccgccaaggagcgcgctgcgaaggccgcggaggcctcgtacgtggcgagccatcccgaggcgaagtccaagccgacaggcgacgtcatcaagccttcgggctccgatgatctggacgcgcgcctggccggcgtggatcccgagaaggttgcccgcgtcaaggcggccatcgccgcgaaggccaagaaggaggctgcggcgaagcaggcggccgtcgatgagaagatcgcgaacctcgaccctgagaaagcagccaaggtgaaggccgctttggaagccaaggccgcgcgcgaagcggcgaagacggaaacagaaaaggaaggtgagtagcatgggaaaggcgaccgtcatcccgttcggcccccaacatccggtgctgcccgagcctttgcacctcgatctcgtggtggaggacgagaccgtcatcgaggcggttccgcagatcggcttcatccaccgcggcctcgagaagctcgtggagacgcgcgattacaaccagttcatctacgtggccgagcgtatctgcggcatctgcgcgttcgggcattccatgggctacgccgagaccgtcgagaagctcatgggcgtcgagatccccgagcgcgccgagtacctgcgcgtcatctggcacgagctttcgcgtatccactcccacgtgctgtggatgggactcgcggccgacgcattcggtttcgagagcctgttcatgcactgctggcgcctgcgcgagcgcgtgctcgacatcttcgagaagaccacgggcggacgcgtcattttctcggtcgtcaaggtgggcggcgtggtccgcgacatcgatgacgcgcagttcgccgagatgaagcgcgtgctggagggcatcaaggacgaataccgccagctgtgcaacgcgttcctcaaagacagctcggtgaagaaccgcaccgttggcgtgggctatatcagccatgaggatgcgctggcccagagcatggtgggtccgttcgcgcgcgcctccaacgtgaactacgatgcgcgcatgctgggcaacggcggctacggcttcctgtccgacttccagcccatcctcgacggccaaggcgactgctacgctcgcgtgaaggtgcgcgcgctcgaggtgctgcagtccatcgatatcatcgaggagatgatcgccaagatccccgccggcgacatcgccgtcgacgtgaagggctcccctgcggccggtgccgaggccgccaacgtggtggagcagcctcgcggcgaatgctactactatgcgcgcggcaacgggtcgaagttcctcgaccgcatgcgcatgcgcacgccgacgtcgcagaacctggccggcatggccacggcgctcgccgggtgcgacctggccgacgtcaacatgatcgtgctcaccatcgacccctgcatcagctgcacggaaaggtaggaggaccatgggaagcttcaagctgggaaaaatgaccctcgggggcctgttcaagaagcccgagacgctcatgtaccccgtcgagacgaaaacccctcccgcgggtctcaagggccatgtggtgaacgacgttgaccgatgcatcctgtgcggcatctgccagaagcgctgcccctgcgccgcaatcgtagtggacaagccggcgcgcacctggaccatcgaccgcttccgctgcgtgcagtgcggcagctgcgtgcgcgaatgcccgaaggactgcctgaccatggagcccacgtacacgccgccggcgacgagcaagcacgtcgactccttcgaggttccggagaccaagaaaacggcgtaaggcgagtcccgtcggaactgcgaagacccgggagccctgacggttcccgggtcttctttcgtttccggccccggggatacagttcctcatgcacgcttttgtcaaccaggtgcgggcatatggatccctttcgcttgacaaaagcgtgcatgaaccaaacgaacgcgccagaggggaactctctggccgtcgtcgcgcgaggtgcgcgggcgaatggaaatcccgttgaagacgtgaacaaggacggggttctggggaaacctgctagaatggtgcaaatcggaacacgttctaccgggcccgagcgcatggcccggtttttgcgtcgagagacggcgcggaagggaaggatgctcgtatgggacagaaggatgagggctgcgcagccgaccaggtgagcgaccgcatcttcaccgtgccgaacatcatctcgttcgtcaggctgtgcctcgtgcccgtcttccttgtgctgcttctcaacggtttcaacgtcgcggctacgctgctgtacgcgctggcagcgggcaccgactggatcgacgggcagatcgcccgccggacgaatgccgtgtcccgtctgggccagctgctcgatccggcggtcgaccgcatcctcatgatctcgggcgtgtgcggcctgttcctcgtgggacgtctgccgctgtggatcatcctcgtggtgctcgtgcgcgatctgctgctgctcatgggcggcgcggtgctgctcaagcgctttcgcgtgcgcgtggccgtcatctttccgggcaaggtggccacgacgctcttgttcgtcggcttcgccggcctgctgctgaactggccgctcgtaccgggactcggtctcgtggacgcggcttggttgccgggtttgaacgggctgccctgttcgtggggcatctggttcgtatatgccggacttgcgctggggctggtcactaccgcgtattacatcgctgcggcactgcggaagctgcgtgctgtcaaggatgcgcaggcggagagcacgcggtagcgcatggccgcccggacgcccagaaaagcgaacgcgagccgcaccggacgacccgatcctgctcgccgagcgccatctgcgcgcgagatgcgcgagcgcgccccccagcgtcccgccgcctccgcgccgcggcgcgctccgacgacgccgccccgccgcggcgggacgaacgcgggcaaggggtcgcggcagactcgttcttccgcgcaacggccgcgcggttcccgttcctacaacacgcccgccgtctggacgaaggaggcgccacgctcgaatctcgcaggaggagccgcgcgccgagcgctcgtcgcagtcggcggcgtgctgctgtccttgctcgccctggtcggcaaggggcttgcgacgttgttccgcgcgctcgcggctctcgtggcgcgcagccgcatcgcgctcgccgtggtcttcgtgtgcgcggcgctgctcgtcttcggcgttgcggacttcgccgtaaacgcgaacaaagcttaccccggcgtgcgggtggggcagatcgacgccgccggaaagacggccgacgagctggccgccctcatcgacgaggtctacggcgcgcgcctggcccaaggcagcgtgaccatctacgcgaacgacgaagcggaggcgcgcatcgccgacgagacggccgccgcgcaggacgcggcgcttgccgagcagctggcgttggaggaggcgcgcgccaacaagcttgcttggacggccgacgcggcctcgctcgaggcgcgcgttccttccgatgagctggccgccgaggcgctcgccgtgggtcgcgaggacggcggcatcctggcgcgtctcgctgcgttggcgacgggccgcgagctgaagcctcgcgccgcgtatgcggagacggcggtggagtcgctggcttccgacatcgacgcggccatcggcgacccgcgcgtcgactacgggatcgtcgtggaggacggcacgggttcggtcaccgaaggccatgacggcttcatggtgaatcgcgacgagctcaggcggacgctcgacgagctgctgctcggtcaggaggacggtagcaggtcgttcgtcgcccgagccgagcatgcgcctttgcgcatcgacgagtccgccgcgcaggatgcatgcgacgctgtgaacgcggccattgccgacggggcgcggttcacgtacgaaggcgccgcttggagcgcgtcggcttcggacgtcggcagctgggtgtccacgcgcatcgacgggtcgtctctcgcggcgttcgtcgacgccgccaaggcgaagcctgcgctgctggcgcatgtcgccgaggtgggcaaaggggatcccgtgcacgtgtcgttcgaggtcgcagacgacgatgtgatcgtccgcaccgatggcgagggcgccattccgctagtcgcggaagctacggggctgttggatgccgcgctgttcggcgatgacggcaaagcgcgtaccggcgtgggagcgggcgcgccggtcgaagtggccatcggctccggtcccgcacctgaggcgatgccgttcgacgaggcgatggatctcggggtgatcggcgccatcgcctcctacaccaccgagtacgccacaggccccggcaccgaggcgcgcaaccacaacatcgcgctcgtgtcccagtacctcagcgactccgtggcgaagcccggcgacagctggtcgttcaacgggacggcgggggattgcagcaccgaggagcgcggcttcaagggcgcgggcgccatcgtggacggcgagtacgacgacgccatcggcgggggcatctgccaggtggccaccaccgtgttcaacgccgtgtacgatgcaggattccccgtgctcacgaggcacaaccactcgctttacatcgccagctaccccacggggcgcgatgcggcggtcagctggcccgatcttgacttcgtatggcaaaacgattccgctagcgatgttttggtgcgtctttcttgtgtggacgggtccgtaacggctacactatacggagtcgaccccggatacaaggtgtccacgacgacgggcgactggggcgaaggccggaagtacgagacgaggacgacgatcgacgatacgctcgcgccgaacgcgagctacgtcaagacgcgcggaaccgatgggcgcaccatcaccattatccgtacggtcaaggacgaatccggcgaggttctgcacgaagatccgttcagctccgtgtacgatccggtaacggaggtcgtcgtcgagggtcccaaagtcgcgggcgacggaaaaagcgacgctgcgacggagggttcttcatccaacgtcacgagcaattgagaggtgagcatccaaggtgtactatcagccagacatcgagaccatgcccgtagagcagctgcgcgacctgcagctggagcgcatgaagaagaccgtgcagcactcctatgacaacgtggcgttctaccagcgatcgttcaaggaggccggcgtcgagccgggcgacctcaagaccctcgaggacctgccgaagttcccgttcgtcgtgaaacaggacatgcgcgacgcctacccgttcgggctgttcgccgtgccgcagaaggacgtggcgcgcatccacgcgtcgtcgggcacgacgggccaggccaccgtagtggggcataccgcgaacgacctcaagaactggggcgactgcttcgcgcgcggcatccatatggtgaacggcaacgaggactccaccatccaggtgtcttacggctacggcctgttcacgggcggcttgggcgcgcactacggcggcgaggccgcgggctgcacggtcatccccacctcctcgggaaacacgaagcgccagatccagatgatgaaggacctgggcaccgatattctcgcttgcacgccctcctatgcgctgctcatcgccgacaccgccatcgagatgggatacgacccggcggtcgacttcaagatctcggccggcatcttcggcgctgagcccgcctccgaaagcatgcgcgaggacatccgcaagaagctgggcatccagtactgcgacgtgtacggtctgtccgaagtcatgggcccgggcgtggccatggagtgcgcggagtcgcacggcctgcatgtggcggaggatcatttctacgccgagatcgtggatcccgatacgctcaagcccctgcccgacggcgagtacggcgagctcgtgttcaccacgctcacgcgcgagtgctgcccgctcgtgcgctaccgcacccgcgacgtcacgcgcatcatccccgaggagtgcgcgtgcggacgcacccaccgcaagatcgaccgcatcgtggggcgcaccgacgacatgctcatcctgcgcggcgtgaacgtgttcccgtcccagatcgagcaggtcatcgtcagcttcccggagatcgcggcgcagtaccagatcatcctcacctcgaagggcccgctcgaccacgtcgagctggacgtggagacggtgcccgaattcccgttcgacgagatccgcaagctccaggacctcaaacgccgcttggccgccgagctcaagagcaacctgcagatcgccgtggacatcaagatcgtggagccgaagaccatcgagcgcagcgagggcaaggcgaagcgcatcatcgacctgagagaagggaagaaggcatgatttcgcagctgaccgttttcctcgagaacgagaagggccgcctcgcggccgcctgccgcgccgtgtccgacgcgggcatcaacatgcacgcgctgaacctggcggacacgtcggacttcggcgtggtgcgcatgctgaccgacacgcccgaggccgcagccgaagcgctgcgcgagcagggctaccgcgccaccgtcaccccggtgctggccgtgcgcgttcccaacgtgccgggcggcctggcgaagctcctcgagttcatggacgagcaggacgccaacgtcgagtacggctactgcttctcggtgaacgaggactacgccgtcgacgtgctcaaggccgacggttcggacgacctggagcagaagctgaccgatgccggtttcgagccggtgcgaccggaggacatctaccgcattgactaacttcttcgagcatatcgcatccgtcgggcgagcgcgccttctagcatgcgcgctcgcctgcgcgctggcgctttcgggcgccgcttggacggcacccgccttcgccgacgtgcgcaaagcagacgtcgtatacggccaaacggtcgatgcacgcggcctggccgtggcgcagtgccccagcatcgacgccgagtacgccatggtcatgggggccgacggcaccgtgtacttcgaacgcaacgcccaaagccccacgcagatcgcgtccatcacgaagatcatgaccggcgtggttgccctcgatgccgtggaggacgggctcctgtcgctcgattcgcccgtcacggtttccgccgccgccgccgcggtaggcgagtcgtcggcgggcttgcaagagggcgacgtcatgaatctcgatgcggcgctcaaggcgctgctcgtgccttcgggcaacgatgccgccgtggccatcgccgagacgatcggtgctctcatggagccgggcacgtccgatccggaagccgtgttcgtgaacgccatgaacgccaaggctcaggagctgggctgcaccgacacggtgtacgacaacccgcacgggcttgatttcgacgcctacgcgggcgatttgcacagcacggcggccgacgtggcgaaagtggtgcagtacgccatgaccaacgacacgtttcgcgcggctgtgggcggcgggagcaccaccatccaggtgacgcgcgccgacggcgcgaaggccgacatctaccttgagaccaccgacgggttcttcgacatctacgagtacgccataggcgtgaagaccggcgtcaccctgctcgccggcccgtcgttcgcgggcgccgccaacaaggacggccgcgagctgtacgccatcgtcatcaactcgtcctccgaggcgcagcgtttcaaagacgccgagagcctctgcgaatgggtgtaccagcacgagatatcctaccagcttgcgaacagccccgaaaccgccacgatgaacggcaccgaggtgccggtggtggctgaggtggcccattccggctggatcgacaagacggtgaaggcgacgctgcgcgaccctgcggcagccgtcaccatcttcgacttgaacggcaacgtgagccagtcgctcgagttcgacgagctggcgggcaacgtgaaggaaggcgacaaggtgggcacgatcaccttcaagcagcgcaacaccgtcatcgccacgatggacctcgtggcatgcgaggacgtcgacgcgcccgacttcttcgagggcgtgggcgtgtggtgggaccgcctgttccgcagcttctccggaggccaggaagtggcgcgttccatcacgctcaacgagacgccgctcgtcatcgacaagaccgcgtccgcagcgtagcgccggactgaagagaggatacgccatgagcatgtgccctgtttgcaacaaccccatcgattcgcaggctccggtctgcccgcattgcgggttcaagctgctcggatccacccagcgtttcgagccggtgtcgttcggcgacgatgcactgcccgtcgcggccgccccccaggccgctgccgccctccacgtggtgcgcggcccgcagaccggggtcacctaccaactgggcgatcaggcgctcaccatcgggcgcagcccgcagtgcgacctgttcctcaacgatatgaccgtgtcgcgcgagcacgcttcggtcgagcctgcggacggcggctacgtcatccgcgacgccaactcgttcaacggcgtatgggtgaacaacgaaagcgtggaaacgcgccggctcgtctcgggagacgtcatccagatcggcgccttctgcctggtctacaaggaggagtagacgcgatctcgcgtgtcgacaggcgcgcttcgcactgcacccaggatggcaacatgcgcaaaacgcgcgccgttcggctcggttttggacgtttgaccggggcgggcggtgcgcgttgccgtataattccccagtgggtttatcacacggaagggttcgctcatggaattgatgtcaggcaacgaggcaatagcccagggggcatgggaggccggcgcgcgcatcggcgtggcctatcccggcacgccgtcgacggagacgctcgaggcgttcgcgaagaaggacggcgtgtacgccgaatggtgcgtcaacgagaaggtggccgtcgaggtgggcatcggggcgtcggtcgccggcgcgcgcgtgctgtccacgatgaagcacgtcggcgtgaacgtggcggccgacccgttgttcactgcggcatacgcgggcgtgggcggcgggctcgtggtgctggctgccgatgatccgggcatgtactcgtcccaaaacgaacaggattcccactggtacgcacgcgcagcccacatccccatgctcgaccctgccgattccgccgaggctttgcgcttcacgcgcgaggcgtacgacgtgtccgagcgcttcgacgtgcccgtcttcatccgttccacagtgcgcgtgtcgcacacgaaaacgccggtggagcccggcgagcgcaccgagatcgcgctcaagccctacgaaagcgatccggcgaagtgggtcatgatgcccgcgttcgccaagccccgccgcaaggtgcagctggcgcgcatcgacgcgctgcgcgcctgggccgaggagtgcccctacaacgaggtcgtgcgcaaggggagcgccgtgggcgtggtgtgcgccggcgccgtctaccagcacgtcgtggaagcgctgcccgacgcgtccgtgttcaagctgggcctcacctggccgcttccgcagcaggcgctgcgcgacttcgccgagagcgtggacgcgctctacgtggtggaggaggcttccgagtacctggacgagggcgtgcgggcgctgggcatcgaggttgccgcgttcgagagcccgctgccgcgcgacggcgaactgacccccggcctcatcagagcggcgttcggcttcgaggagcctgctcacgagccgttgcccgccggccttccgggccgcccgccggcgttgtgcgccgggtgcccgcaccgtctcgtgttcaaggagctttcccgcatgaaggccgtcgtcaccggcgacatcggctgctacactttgggcgcgctgccgccgctgtccgccatggacaccaccatcgacatgggcgcgtcggtttccatgtcgcatggcttcgagctggcttgggcgggcaccgaccaccgtcccgtcgtgggcgtcatcggcgactcgacgttcgcgcactcgggcctgtcggcgctgatctccaccgtgtacaaccaaggacgcggaaccgtctgcgtgctggacaaccgcaccacggccatgacgggtcgccagggaaaccccttcaacggcgagacgctgcaaggccgcctctcgcgcgagctcgaccttgagagcgtcgtgcgcgccatcggcgtcgaggacgtgcgcaccgtcgacccgaacgacgccaaagccgttcgccgcgcgctcaaggaggccgtggcctcggaggagctttccgtgctcgtgttccgcagcccctgcgtgctgatcgaccggcatcgcgagcccgcctacgcggtgaccgacgcctgcacggcatgcggcgtgtgctcgactttaggctgtccggccatcgcgaaggatccggcgaacgaccacgcgctcatcgatgccgcccagtgcatcggatgcggccagtgcgcccagtactgcgcttggaacgccatcgcgcaacccgctggggagaaaggaggcgtcgcatgatgacctcgaacgatactgtcaccgtccttctgtgcggcgtgggcggccagggcaccatcctggcggccgacctcctggcccatgcggcgctggaatccggttacgacgcgaaggtgtccgagatccacggcatgtcgcagcgcggcggcgcggtgaccacggtcgtgcgcttcgggcgcgcgggcgtgcagtccatggtgtccgacccgggatgcaccgattgcgtcgtctccttcgagaccaccgaggcgttgcgcaaccttcccaacgtgcgcgagggcggctaccttctcgttgccgacgagtccatccagccgcttcccgtgctcatcgggcgcgcttccatgcccgagcatgcgcgcgagacgctggccgctgcgggcgccacgctcatcccggccggagacatcgccgtcggcgtgggcgcgccgaagtcggtgaacgtggtgctgctcggggcgttggcgacccgcctcgacttctcgcaaaaggcatgggagcgcgtcgtcgcgcgccgcgtgcctcccaagaccgtcgatgccaacttggcagcgtttcgcgcgggcctcgcgttcgctcgcgaggctgcgggcggggaaggggcttaaggcgtgagcgttcaacagatcagcgtattcttggaaagccgccccgggcacttgcgccgcgtgctcgatgcgttcgaggacgcgcatgtcagcgtgcgcggttacagcgcctccgacacgggggactacggcatcgtgcgcttcatcgtggatgcgcccgacaaggcgctcgccgtgctgcaggatatgggcgcggcggccacgcagaccgacgtcctgtgcgcgcgtctcgacgacgtgcctggcgagctggcgcgcgtcatgggcatcatggccgactgcggcatcaacgtgacgtacagctattcgctcatctccacctacatcgcgctgtccgtcaaggacatcgcgcgcgccgagaagctgttggcggctcagcccgtcgagctcatcgggcaggacgacctcgcccgccccgtcgcgccggaaagccggtgatccgcgtgaccgacatcaccgtgaaaggagcggctttggccgccgtcgcggcaggcgatttctcaagcctgcccatccacaatccggctgtcgaatgcgcctcgcgcgagcgcatccgcgccatccagctggagaagctcgtcgcgcaggttcgctggacgtacgagcgcgtgccctggtaccgtgcacgcatggacgattcgggcgtgaccccctccgacatcaagacgctcgaggacgtgcgcatgctgccgttcacggacaagtccgtgctgcgcgacactttcccgtacggcctgttcgccgtgccgctggacgaagtggtggaactgcactcgtcgtcaggcaccacgggaaagcccatcgtggtgggctataacgaaagcgatatggccatgtgggccgactgcatcatgcggctcgtgcagatggcgggcgtcgtgccgggcgatcgggcgcagatggccttcggttacggcatgttcaccggcggcttcggcctgcactacgggctgcagaagctgggctgcatgatgatccccgccggctccggcaacaccgagcgccacatcgccatgatcgaggactacggcaccaccgtgctggtggccacgccgtcctacgcgctgcacgtgtgcgaggtgggggagaagatgggctacgattgggcgaagtccccgctgcgcgtgggcctgttcggcggcgagccgtgcccgccgggcctcaaggccgagatcgaggatcgcatgcacatcgtgtgcaccgacaactacggcctgaccgaagtcatggggccgggcgtgtcgggcgagtgcctggcctcgcgcgacatgcagcacctcgccgaggaccacttcctctgggaggtcgtcgaccccgagacgggcgatccggtccccgacggcgagatgggcgagctcgtgctcacgccgctgggcaagcaggccatccccgtgctgcgctaccgcacgcacgatctgacccgcgtggtcacggagccgtgcgcgtgcggccgcaccacggcccgcatgcagaaggtgcgcgcccgctcggacgacatgctcatcatccgcggcacgaacgtgttcccctcgcaggtggaggacgtgctggccggcatcgacggcgtcacgccgcattaccgcatcgtcgtggagagcgcaggcggcctcgaccgcatgaccgtgcacgtggagctcaagcccgaggcgttctcggactcgtacgaggacatggagaatttgcgccgctccatcgaagacaagctcaagggcgtgctgctggtgggtgtgaaggcgaagctcgtcgagcccggcggcatcgagcgcagcaccggcaaaaccaagcacgtcgaagatttgagaaagtagagggttccgcgtggaagccgcctcgtcgtccgctcccgtggtggggcggttcgctccttcgccgacggggcggatgcatgcggggaacgtgttcgcggcgttgacggcatggctcgtggccaagtcgcaaggtggccgcatcgtgctgcgcatcgaggacctcgatgccgagcgctcgaagcccgtctacatcgatgccgtgcagcgcgacttcgaagcgctggggctgacttgggacgaagggccgtacttccagcacgaccgcacggaggcctaccgggccgcgtacgatgagctgcgcgaacgcggccttgtgtacccctgcttctgcacgcgcgccgacctgcatgcggcatcggcgccgcatcgcggcgagaagccggtgtacccggggacctgccggcatctgagcgacggggagcgcgccgtccgcgcgcagcagcgcatgcccgcgcagcgtctcatcgtgcccgatcgggaggtcgccttcgtcgatcaggtgcagggatcctacgcgcagaacctcgccgccgactgcggagacttcctcgtgcagcgctcggacggcgcgttcgcctaccagctggccgtggtggtggacgacgcggctcagggcgtcacctcggtggtgcgcggcgtggacctcctgtgctccacgccccagcagctctacctgcaggagctgctcggtctgccgcatcccgcctacgcgcacatcccgctgctcgtggccgagcgcgaccggcgcctgtcgaagcgcgaccgcgacgccgccctcgatgcgctgctcgcgcgcttcaagacgcccgaagccgtcatcggccatatcgccggcatcaccggccttgcgcccacatgcgaccccgcaacgcccgaagagctgctggcgacgttcgatctcgccgcgctgccgacgaccttcgacgacctcgtgcaagtgcgctggaggtaagcctaccggagtcgccccgccgcagcgactccgctgccgtgggcgcaaaacggcacccatgacgttttcttgaggctatccactaggaaatcgtatatcgaaaaattcgccatcaggggctttggtcgacgtcgcacccgcacggcacgcgcaaattgccatgggtgccgttttgcgcccacaacggcgaatcgctcgccgaccccctgttttctcagctgaaattccctcactcacgcattttgcgtgagaattttcgccataattcctccacatttcatccagaatgcagatagtttcgccatcgttcgctgcctaaagttagcccaacggaggaatgcagcgaagggggaggcgcatgactgccatgcaagatgaaaccgtcgtcgacgcgaaagccgtcgaggatcggctggccgcaatcgaggacgcggtatgccgccatccgctcaaccgcgaggtgctctatcgcatgctcgcgtactgcgccgaggagcgcgcgttggacgaccttgagcgcgaagcagcatcctggcccgaattcgaaaccgctacccagaaccagtaccgcctggccgagcatctcgtgcgcgccggcgggctggataggatcgagcgagacgagcgcggcgccattgtcatggaacaggacaaggaggggctcgacgaggacgccgtcgacgacctcgtgcgttccgtagcgtttcgcaccaccgaagcgggagtgcgcttcgtcgagcagcatcgccctcgggcgcgcctcgtggagttgctgcagctcgcgccggaacgcgctgacgtgtatatcgagctgctggagttcgtccgagctcgtccgcgcgcctacaacgacatcgcggaactgctgcgcgggcgccccgcgctggaaaccgtcatcgacggcgagcggcggcgcatgcagcccagcgtgttcgtggacaagctggagcgctcgggcgctttggtctggaaagaaggttggtgtctgacggaggagggggacgcgtttctacgggatctgaaggcaagcgagtagaaccatcataaggagaaaggttggagaacatggctgaaaccacgttgacacgtcgaagcttcgtcaaggcgtccgctctggtgggcgcgacggcggcgttcggcgcttcgatggccggctgtatgcaggaggctccgcaggagcaggctccgtccggcggcggcgccgacgagggtctcgtgaggatgaagacgtcctgccacggctgcatccagatgtgcccggctatcgcgtatctgaaggacggcgtcgtcgtaaagctggaaggcgaccccgacgcgccggtaagtcgcggaagcctgtgcatcaagggcctcaaccagctgcacaccatgtacagcccccgccgcgtgctgcatccgcttcggcgtgccggcgagcgcggcgagaacaaatgggaggtcatcagctgggacgaggccgtcgaggaagcggccacgcatatctgcgacgccatcgacaaatacggcccctattccttcttcgccagcgtgggcggcggcggggcctactcgttcatggaggccatgaccctgcccatggcgttcgggtcgcccaccgtgttcgagcccggctgcgcccagtgctatctgccgcgctggagcatgtcgaaactgttctacggcggcaacgaccagtccatcgccgacaacgccgtgcaggagatattccgtcccgaccccgacaacaaggccgaggtcgtggtgctgtggggcgcccagccttccgtcagccagacggcggaatcgggtcgcggaatggccgagctgcgcgccaagggcgtgaagaccatcgtggtcgatcccaacttctcgcccgacgcggtgaaggccgacgtgtggctgccggtgcgcccggccaccgacacgggtctgctcctgtgctggttccgctacatcttcgagaacaagctctacgacgagcagttcacgaagtactggacgaacctgcccttccttatcgaccccgagacgaagctgccggtgaaggcgcaggagctgttccccgacttccagcagaccacgcccgagaacaccccggcctacgtctgctacgacctcaagacgaacgcagtggcgcccttcgagttctccgcgcccgccgacgccgcagtggaccccgagatcttctggacgggcgacttcgaagggaagacgtacaagaccgccggccagatctacaaggaagaagccgatccctggacgctcgagcacaccgccgagaactgctggctcgatgccggcaagatcgaaaaagccatcaagatctacgccgaggcctccgtggccggcatcgccaacggcgtggcgtcggatatgaccgagtccgcctcgcaggtgccgctgggctgcatgggcctggactccatcatgggctacgtcaacaagcccggctgcacgatgacgcagtacggcgccgccggcgcgccgccgacgaagcgcccggtcacgtacaacaacggcttcgacggcatgttctcggacatgtacggcatcggcgcggtcatcggcatgagcgatgccgagaacgaggcgcgcgccaagaagctgggggaggagaacccgcagcagaagctggcgaaccagctgctcgtcgatcgacttggcatgaaggaccacaagggcctgtacgcatggtgccacagccatatccccacggtgcgcgaggccatcgccaccggcgagccgtacaagccgcgcgtgtggttcgacatgtcgggcaacaagctggccatgctgggcaatgcgaagtcgtggtacgacgtgttccccgaggtcgactacatcatcggccagtacccgatgctcacctccttccacatcgaggccgccgacctcgtgttccccgtgcgcgagtggctggaagagcccatggtgaacatgacccagctcaacacccagtggctgcagaacgagtgcgtgcacatcggcgagacggtgtcgcactccatcccagccgcgcaggtggtggcgaaatgcgcggagaagatgggcggcgagctgcccggtctcaagcccggatacctgggcagcgccaccgaggaggaggtcaaggcctccgtcgccgagacgctgcacgcgcccagctgggacgagctggtgaaggacgccgacaagtacgtgccctacgtcacgccggccagcgagtacttccattacgaccaacatgaaaccgtggtggacgatggcctgcctgccggcttcggcaccgagtcccgcaagatcgaggcgtactgccagatcctgctcaagctggcgcgcacgggatatccgttctgctatccggagccgcaggagccctgcgaggactacagccccatctgctcgtacatcgagccggcggagagcccgctatccgacgaggagtaccccttcgtgctcacgtcgggccgcgtgccgtacttccaccatggcaccatgcgccacgccgcgctgtcgcgcgagctgttccccacggccgagatccgcatcaatccggcgagcgccaaggagctgggcatcgagcatatggattgggtgaaggtgaccagccgccgcggcgaggtgcacgcgcgcgcctacctcaccgagggcgtgcatccgaaaaccgtgtggatggagcgcttctggaacccggagtgctacgacgagtcccagacgaacccgacggccggctggcgcgagtgcaacgtgaacgtgctcacgaagaacgacgccccgttcaacgaagtgtacggctcctacacgaaccgcggtttcacggtgaagatcgagaagtcccagaaacctgcgaacgtatgggtggagcccgaggagttcgcgccgttcctgccgactgaggaaatgctgtccgaagctcagacgaaggatgtgttctgatgagaaactgcctggttatcgatctcgaccgctgcagcggatgcgacggctgcgttgcggcctgcaagcttgagaacaacgtcgatttgggcgtgtgctacaaccgcgtgcacgccgtgggacccacgggcaccttcccggacatcgagcagtactggattcccctgcaatgccagcagtgcgagaaccccggctgcatcgaagtgtgcccgacgggcgcatcgtaccgcgacgaagccacgggcgtggtgctggtcaatgccgaggagtgcatcgggtgcgaatcgtgcctgaagggctgcccgtacaatgtgcgcacgctcaatccgaacacgaatgtggtggagaagtgcacgttgtgcttccagcgacatgaggaggaggactgggtgccggcctgcgtgcacaactgctgctgcggcgcgcgctacttcggcgacctggacgatcccgacagctccgctgcgaaggctgttgcggcggctggcgcggagaactgccaccagcttgacgatccgcacgggctcaaaccggcgacgatctacatcttgtccgccgcaacggcggcatggcagggcgatcctgtgacgacggaccgcgtgtccgcatcgtaagcccgcgcgctgcaacccgtcccggcaggccgaacccctcccaaggcctgccgggacacggtagcgcgtccaagccaggggtcgagaagcaacgagaaaggggagtcacgatgatggagacgcagacctgcgcgggcctcgtgtcggcgctcgagggtcgcgcggcgttctacgacgtggtggcggcgctgtactacaaaccgctcgcccaagagcagatcgaccgcattgccgagggaggccttgcggcattcgccggcgcgggagagctcatggcggagggcctgcacgacatggagcgcgcgctgtcaaagcggcactccggcacgcgccaggagctggcagtggacttcacgggcgccttcgccgggacgtcgtcgtggaaaggccgctacgccacgccctacgagtcggtgttcacgagcgaggaaggcctgctgtttcaggactcctaccacgaggtgtaccgcctgtaccgccagaacagcgtgcggaaaagccccggctacgacttccccgacgaccacctgtcgtacctctgcgagttccaggctctcctggcgaggcgggccgtgcgctcgctcgaggcgaacgatgcggaatgcgcgctcgagcaagtgcgcctttcgcagcacgtgctgcacgaccatatcctgtcgtggttcgacgacttcgaggagctggcgctgcacttggtgaaaacgcgtttctaccgcggcgtgctgaagatgagcaagggcttcttcctgttcgacgccgaggtgctggccgatatggcggaggagttggagaggctatgacgttcgcgctggtgctcgcatgcacggttgccgcctgcttcgcgctgcgcaaccccctcaaagcctgcccgacggcgttctacgcggcggccctgctcgtggacgtcgccttcgtggcggggacgttctggggcatgccccgcgacgcatggagcgtgttcttcgttcttatccagaaatgcctgatgccgcttgccctgttcgtcgtggtcatgtacatcggcgtgctggatcgcggctcgcgcgcctgcatgtggctcaagcccgtgcgcgccgagctgtccatcgtcgcctggctcctgtcgctcggccacgtggccgtgtacggggccacgtacctgccgcgcatcgcgtcgggcggggcgacgaacggcaacgtggccgcctcgttcgcggtggcggtcgtgctgctggcgctgctggccgtgctgggcgtcacgtcgttcaacctggtgaagaggcgcatgcgcaccgaaacttggaagaaggtgcagaagctcgcctatccgttcttcctgctcacgtacgtgcacctactgctgatgctggccccttcggcgctgcatggcggcgttgcggcgacgacaagcgttgcggtatactcgaccgtgttcgcggcatacgtcgttttacggctcgtccgcgcggcgaaggaacgccgtatccgcgaagccgtctgacgctcgaggggaagcgcgcggttcgggctgtcgtccgtttcgggagggggagtcgacggcttcatgaagggatttttcgaaaagctcgtcaaggcgtgcccgtcgctgccgtttttggcgttgggcgtctggctggcatgggcctacatcgcctacagcggcacggcatggctctccgacacggagatgaacggcgccaacatatcaacgatgtacatcgtgtccacgctgacgttcggcatcgtgctcttggcgtccacctttcgggcggctcgcatacggcagctgctcgaccgccccgccgtggtgatcgccggcggcgcgttcgcttcgctcggctgcctcgtcatcgtcctcatcgggccgtactacctcacgaaggtgcttccgtacgacctgatcaccgctcttttctacatcgccagcgcctgcacggggctgggcacggccgtcgtcggcttgaagtgcgggcagctctacggcgccatcgcgccgcgcaaggccatcctgtacacggcgctgtcgcacgtggcgatcgcagtcatctacttcaccgtcatcggatcgccctcatggcagcccgtgcccggcgggccgtcgctcgcgggcatcctcgccttcgtgggcatgccgcttgcggcagccggagccgccgcgctgtcgttcatcgcgccgtcgggcgagaaggcggagcgcggcgagagccgctcccgcttcccgcgctcgttctggaagctggcagccgtcacgttcgcgttctcgttcgtcgtggttgccctgcgctcgatgctcgtcgaggtgtcgccgatcgatgtcacgttggacaacacgcgcctggtcatgctgctgcgcatggcgatggcgctcgtcttcgcagcggccgccatcggcgtggagggcgaacggttcgatttcggaaagatctactccgtcatcatggccgccgtcgtggcgctcatcgcgttctgtcccatcgttggcgtcacgcaccttggatggagcgcgctcgtcacgttcctctcggcggtcttcgaattcgtgctgtggtgcatcctcgcgttcgtggtgtaccaacgccacatctcggccgtactcgtgttcggcttcggttatggagcgttcatggcggggtcgggagcaggatggctggcgggcgtgcacgtgtttccgcagatagcagccacgggcaactcgatcgtgctgtacctcgtgctggcgttcgcagtgctggcctgcgcgttcgtgctgttctcggagaaggagttcgatcgtctgttcaagcccgaaggggagggggaggcctcgctcgacgacctgctgggcgacgagctgcccggtatgcgccccgacgacgctgacgcgcatacgaacaaaaaggggcgcttcgggctggccatcgatgcgctagccgatcaggcggggctgtcgcgacgcgagaaggacgtgctgcgctgccttgccatgggctacgatgccggcgccgcagccaagcgccttcaggtgtcgtggaataccgtgcgaacccacacccgcaacgtgtacacgaagctggatatccattcgcgccaagagctcatcgacctcgtcgaccgcgccaccgaacgtacgcaggagcgctgatcagacgaacagaatcgagagcgcggtcataacggcgcaggctcccagcagcaagacgagcaggcgcgcgccgtccttcttgaagcgatcccgatagttctgctcgtcgcgacccgcgaacagcgtccaaagcaggctcaggcagaacgccaccagcgctatgttgttgaggatggaggaggtttgcgcgaacgccggcacgccggtcatcttgctcatctcgtaggccatgagcgtggccgtcacggcgaagcaggcgaccatcacccatgccgcgcgctttcccgtattagcggttccttcggggaagaacgtgcccttcttcgtcttctcgggcttggcgatgaggaacagccagcgcccgttgtacagctgcaccgtcagcagcgcgaacgcgaccagcagcaacacgcctagaaccaaacgagcgatctccatccgcattctcctttgttcctcgcaagcggcgtccgtcgccgttgccgcatcgtagccgcagccccgggcggcgtctcccgcctcgtcgttttcacgtccttggaagtatacggcatgcacggcccttccggccaccacgtgacgcgagatgccccgaaagcggaagggcctctcgcacggtgcgtcgtgcgagcacgatgtttcgggggctcgcgtcgtcgtgcttcgagcgaggcagatcggcccgagtcgctacagccccgccgcgacggtcgcttccatgagatcccgttccttccgctagagcgcgaccgcgatgccgcttgccaggatggccgccgcgtagaacgcgcccaatgcgatgttcgcgctacacacctgcgccatggcgccgatgcgggcctgcggcgccaacgggttgcccagcagcgccttgagcaggggatagcttgccagcagcatgaacggcatcaccagaagcccgttcgtgaagaacgcagccacgagcacgacgatggcggccacccaggcgtacacgacgccgtgatacagcttgcgcgcccgctcgcgtcccagcagcaccgacagcgtgcggcgtcccgattccacgtccttctcaacgtcgcacgtgttgttcgtgaacatgatgagccccacgcccaggatggtgggcacggcccacaagagcgcacggaggtcgaacgtgccggaaagcgcctggtagcacgccagcggaatgagcccgcccatcacgaacccgctgaccagctcgccgatgggcaggtacgagatgggcgtcttgcccgccgagtacagcaccacgacgacggcgcccgccgcgccgatggcgagcgggatccatccggcgatccagatcacgtacgcccccagcagaaacgccgccgcgaggaacccgacggccagagccagcgccgcgcgcgggttcacgttgttgtacaccagcaccgcgtcggtcgggtcgacgttgtcgtcggccgagtcggcgcccttcacgtaatcgtagtagtcgttgaacgtgttcaccgccgactgcatgagcacgcagatgactagcagcacgcataccatggtcgccgagatgctgaaggaggtaacggccgccgccgcggcggcgacgagcacgggcaggatggcggccggccaggtatgcggcgcggccagctgccaggccatgcggggggtcagtcgtccgtacgcgctagcggtcatgcttcggttcctttctcggggtcgtacgtttcgcggcgtcggggaagccaggtgggcggggcgggcttgaagcgcttgacggtctcgtccttgagtatgcctccgagcgagcccagcgtctgccagatgaagctcttcgtctccgcgtccagcttcgagcgcgcacctaaaagctgcctcgtgttcgcgaacagcttggtttggaactcgctccaggttccggcctcggtggaggcgaacagctcgtagatggtgtcgatgaagcgctcgcgctcgtcgggagctttgctacgcagccacgcgtcaagcgcctcgtcgaaaaacacggcggaggggttgagcgcctcctggtacacgaagtcgtcgtcttcggtcaaccaggtgaaaggctcgtgctggaacaccgacatagccgaggatcgcaccacgcggtagtcggcgcggcgctcgaggatcatgccgaacgccgacgactcgggcacggtcttgtgcagcagggcgtggaatcgatcgtcgtcgatgcgcggcgaaggatcgtccagaaacgacggcccgtcgtggttgaacacgccgcgcaagcgctcgaaggcgctctcgtcggctacgagcgcagcatactcggcgaggttgccgcccttggagtgcccgccgacgatgagcgggcaggcgagcgccgacgccacgcccgacaggtacgccgccgccgtgcattgggaagggatcacttccttgaagcagaggttgaagtcttccttccaaccggcgaaactgccgtcggtgccgcgatacgcgaggtaggcgacctcgccgtcggcggcggggaacgtcagcgtgacggcggagaattgcttttccacgatctccgatcgctcgttggcatagaacgaggcgcgtacgtcgcgcatgcggcggcttgccgacaggacgtgcagaaacgcctcggtgtccttcgcgtcctccatccagctgtgcgcggtgagcgcttcccaatcggacagcatcaccacgtcgtgcagcaggacgccgtcgggggaagcgaggtcgacgccgggcgccacctcgtagttgaagtacgcgagcgtcgcgaacacaagcgagtcgacggggttaaacggtgattccgcgaaggtgcgctgctcttcggccatatacgttacgatattcctcatgcgaacattgtagccgattgcaaaggacggacagcgaagccatgcgggtttgcacgccaatcaccatacgctatgcggagaccgacatgatgggcatcgtctaccatgccaactatctgctgtacttcgaggatgcgcgcacgcggttcctcgaggctatcgggtttccgtacgaccatatcgagcaggcgggctacctgtcgcccgtcacgcatttcgaatgcgactacggcgcgcctttgcgttacggcgacacggccgtcgtgcgcacgcgcgtagtgtcctcgcgcccgacgaagaccgtatacgcctacgaggtgttccgggaaggccaggatctcgacatcgagaagccctgctgcacgggacggagcacccattgcctcgttgatgctgaaacgttcaagccggtcagtctgaagcgcgccgtgcccgagctgtacgaacgctacctcgaagtcctcgaacccgaggagggggagagccgatgagcgcgccgcatcgcatcctattcgtgtgccacggcaacatatgccgttcaaccatggctgagttcgtgatgaaggatctcgtctcgcgccgaggcatggccaacgccttcgtcatcgggtcggcagccacgcacgacgacgagatcggcagccccgtgcatcacggcacccgcgccgtgctggaagcgcagggcatcgattgctccggcaagaccgcccgtcgcctgcgccgcgccgatgctgacgaatgggacctgttcgtaggcatggacgaggcgaacatgcgcgacatgcgtcgccagctgggacgggctgcggagggccgctgcttcaagctgctcgagttcgccgattccgcgcgtgacgtggccgatccttggtacacaggcgatttcaacgtcacgtacgacgacgtgctggccggttgcgcggggcttctcgcgtggttggactccggcgcgccccgctcgtaggagcctcgcgtggacatcgccgttctcgacgccatccagcagcatctgcgcacgccgctgctcgaccagatcatgctgctggccacgcatctgggagacctcgccctcgtgtggctcgtcgccggcgccgtgctcgtcgcgcagccgaggtaccgcaggtggggcgtagccgtactcctggccgtcgtcgcgaccgcgatcctcggcatgttcgtgctgaagccgctgttcgggcgcgcacggccgttcgtcgcctacgagttcgccggtctgctcatcccgccgccgtcgggcgattcgttcccctcgaaccactccatggtgtcgttcgccgctgccgcggcgctgtgctgtctgccggggaagggcagaggcgtgctggcgctcaaggtctcggccgtggccgtcgcatgcctcatcgccttctcgcgcctctacctgtacgtgcactatccctccgatatcctggcgggcgccgtcatcggcatcgcggtcggcatcggttcggtttggctcgtggagaagacctggcccgaatcgtcgtcagactgagagcgttgccgaagaggcctctcccgtcgcgagcctctaggccgacgcccgcttgcgcgcgggtttcttcgccggagcgggcttcttcggctcgccgtccttgccgtcgcgcgccttgaggctggccgacagggcgtccatgagattgatgatgttcgacggctgggcttcttggctttcggccacgatctgcttgccggctatcttgtcctggatgagctgcatgagcttctcctggtacgtgttgcggaagcggctcggatcgaacggcgcagtcatgctctccaccagctgcttcgccatggacagctcctcgtcggccacgtcggggtgctggagcgtcttggggatgtccttaacctcgctctgatagtgcagcgtcatcatgaccaggtcatcgtcgtgggggatgagcgcgatgggcgtttccgaattgcccagcaccgtcgtgccgatggcgatcttgccttcgtccaccatggctcgtcgaagcagttcgagcgccttctcgccgccgggctgggctaccacctggtagggcttctcgaagtagagaggcggcacctcgtcgatgtcggagaactgcacgatcttcatagcgcgatcggcatcggtcttgatgacgtccagctcctcgtcgtccaccactacgtacttgcccttctcgtactggtagcctttcacgatgtcttccggtttcagctctcgtttacagtcagggcacgtcttcacgtatcgcacgcgcttcatgctatctttggcaagttggttgaaccgtacggcgtcatcctgcgtcgccgtgaacagctccaccgggatgtacacgagaccgaacgcgattgcgcctttcctaccggccatgacctgctccttcctcgcggatgcttctcggcatcgtagcgcgggcttgccgtctgcctcgcttcggagatcgaccgaggacgaactgcaacgatggcgttttcacgcgggcaagctggcagatgagctgaggcgaggaaaggaggcggaagcgggcatggacgagcaggtcgtctattggatcggcttcttcgttgcgctcgcgttcatcgtgttcggcgcggacgacgtgctgtgggacgtgttcgcgctgtttcgcggcacgggcaagaagcgcgtgaagctgtcgctcatcaacgagaagccgccgaagatgctggccgtggtcatcgccgcctggcacgaggacgccgtgctgggcgaagtggtggacaacctcgtggcctccgcgcagtacccgcgctcgctgtaccgggtgtttttgggcgtctaccccaacgatgcggctaccgtggccgtggctcgcgcgctcgaggtgcgccatggaggcaccgtggtgtgcgtggtgggagacgatcccggacccacgtcgaaggccgccaacatcaaccataccgtgcgggccatccgggaatacgaggccgagcgcgacgtgcgcttcgcgagcgtcaccatccatgacgcggaggacgtggtgcaccccaacgagttcaagatgacgaactacttgatcgacgactacgacgccctccagttccccgtgttcccgctgcagcgcatgccgcggctgcggctgttcttcaagacgttgacctcgtccacctacgccgacgagttcgccgagcatcacttccgcaccatggtcatgcgcgacgagctgggcttcgttccttcggcgggcacgggcttcgccatcggccggcgcgtcctcgacgcgtttcgcgacgaggacctgctgccgcgcaacagcctgaccgaggattacaagctgtcgctcaccttgcgcatgcgcggcttccgcgtgcactacgtgcttgagaaggtgccgcgcgtcgacgcgcgcgggcgcaccgtgtgggactacatcgccacgcgctcgctgttcccgtcgacgttcaaggcggcggtgcggcagaaagcgcgatgggtgtacggcatcacgatgcagagcgcgagcatggccgatgtgttcggcaaaagcgagcttacgttcgccgagcgcacgtttctgtacaagggcctcaaggcgaagttcgcgaacttcgtgctgctgccgggctacgccgtgctcgcgtacttcctcgtgcagacgttcgcgccgcagctggagctgcccgtcatgtaccccttgcacagcccttcgtggtggatgtgcgtgtttctgctgttcatgatggtggaacggcaggtgcttcgcggacgcgcgctggcgaacgtgtacggctggaagacgatggcgttctccatcctgctgccgccgctgttcccgctcaggcttctatggggcaacctcatcaacatgtgcgcgacgtttcgcgcatggcggcagaagatcgcctacgtgctgctgcgcggacgagaggccaaggcggccgccgcgccggtcgtcgagcatcggggcaacgcggcagaggaggagggcgaaagaaagcctgcaacggacggagacgaggcgcaaacctcgaatgcgacgtctgcgcaggaaggtcccgcatggaacaagaccgaccacgaatttctccccgcttcggtgctcgaacgctatcggcgccttctgggcgacgcgctgctggagaggggtttcgtggagccagggcatctggaagacgccgtgggatcggcgcgtgcgcgcggcgtgcggttggggcaggagctgctgaggcagggattggtcgaagagaggcacctcacgcaggcttacgccttgcagcagcagtcgatgtacgtgcgtgcacagcccgacctcgtgcttctggagctgatggatcgcatgccgttcgccgcggcggatcggttcgccgcgctgccgctggtcgagagcgaaaaaggatggatcgtcgccgtggacgacgacctttcttgcgcggagcgagacgaactggcgtttctgctgggcgaaccgacgttcttcctgttctccagcacagccgacctgctcgaagcgttcgaaggcgctctcgcgttcgacaacgcggcggaagctccgcaacctgccggggcggcgacgcttctggaggagacgagcgtagagctgccacaggcgggcatggcgctagcttacgcgctgcatctcggccgctcggtcgacgacatcgcttgcgagatgggcctcgccgtgtcgcgtttctcctagtcgaaggcgtcatggagtgcgctgcatatgcgctcggccgcatgcccgtctccgtaggggtcgggagcggccgccatgcgcgcgtacagcgccgcatcgcccaacagcgcctcgcacgatgcgcgcacgccttcgtacgtcgtgccgaccagggcggcgcagcccgcttcaagcgcttcgggacgctcggtatcgtcgcgcagcacgagcacgggcacgtcgagggccggtgcttcctcctgcacgccgcccgaatccgtcagcatgaaggcgcatcgtgccatgaagttggagaaatcggcgtatccgagcggttcgacgagggtgatgcgcggatgcccgcccagcgccctctcggctatcgcgcgcacggcggggttcttgtgcacggggtacaccacgcgcacgtcagcgtgggcgtctgccgtgtcgcgtactgcagcgaacatgcgctccatcggttcgcccaggttctcgcgccgatggcacgtcaaccctaagacgcgcaatccgtcgaaatcgaccgcttcgagagccggctcctcgaagcggtaggaagagcttaccgtttcaaggagcgcgtcgatgacggtgttgcccgttacccggatgctatccggatcgacgccttgcgcgaggaggtttgctcggttgccttcggtgggggcgtagtgccaggtggagaggcttgagataagacgacggttcatctcctcgggaaagggggagtaccggtttcccgatcgcaggcccgcctccacgtgccccacggggatctgtcggtagaacgacgcgagcgccagcgcgagagcagtggtggtgtcgccgtgcacgagcactgcgtcgggcgccgcgagctccagcacgggggtcgcggaggtcagaatgcgcgccgtgagcccgtcgagcgtctgacggtcgcgcatgaggttcaggtcatgatcgatgcgcaagtcgaacgcagccgccgtctggtcgagcatctcgcggtgctgagccgtcgagagcgcctcgacctcgaacgccttgtcggcttcgagcgcgttcaaaaccggcgccatcttaaccgcttccgggcgcgtgccgaatgcgatgagcacgctcttcctgcgcttcatgcaagcctccgtttccttgcggctccaagacggaggaagggccggcatatgccggcccttctcgttcgtatcccgttatgcaagacgtcggacgagcgaaacgcatcccaacacgcctaggaagcatagcagggaaaccacgtaccccatgattcctccttgcaaagagcctacggtatccatggcgcacacgataccattccgcagaccgaacgcaccaaagcgttcatatcggttaccgtgcagtatcctaaacgtaaccgccgcagatgacgcggactctagcctgagaacagcgcggtagacagcgcctgctcggctccgctcgccggcccccatgcgttgtccgtgcgcgtgaacggcaattccaccgggttggattcagtcggttccaccgagccgagcgcttcgagcaccagctggccgaccttctcgttgatctggtcggcatcgagctcggccgtctgctcatcttctgccagctccgtcgtagcctccgtaagcgcttgggcgaacgcgtcgaacttcttgcaggtaagcaccacggtcgccgtggcgctgtcgccgtccaccttcacctcgtcgatgcggtagtcgaatccgtcgagataagcggctatgaacgacttggcgtcgatgccgtaggttgccagctggtccaccccgctgtcggccgccagctcgtcgagcagcgcctcgtcgtgggtcttcaggcgttccagctcgtcggccaccccctgtcgcaccacttcctccgcgctcgggccgcaggcgccgagcgatagggctccgacgctcagcgcgaccgcggcaaggcaagccgccacgatcgttttaatgggtttcatcgttttccccttcctggtatgcgtcgttccagcataaggccttgcgagcctcgcgtccatcccggtttgtcggcttgctgatcggcgacggcataatgcgagcgaccgtcttagagcaactctaagacggtcgcatcgaccgctgcagggggagggggaggctaaccgttcagcaacggctcggtgaaccagtcgcgacgttcccagttctgccgttccatgatgcgcgcgaacgttgaggagcagaaccgacgaaccgcggcctggggatcgtcgtaacgcaacgcatccttcagccgcagaaagtactcggagttctcgacatcgaagaacgcctcgtcgacattcgcatcgctcgacgaccctttctcgataaacggataggccagtacgaagaaggaaggatcgttcgtagcatcgtcgcccggccagaacccgaattccacgaactgctcgtcgaaggcgacgcgctctactatggaagccgtgcgttcgaagggacagggctttccggagaacagcacggtcgtcatgtcgaaggtgccccagaacagcgaaggcgggatcttcttcccgcgaaacggcgccgcgaacccgctcaaagccccgcgcgcgaacaggaactgacggaagctgcgccgtgcagccgcggcatcgaactcgcgcgcgatgttctgccgatcgaacggaacctcagtgtgcatttcctgcgggacggtgttgatggctatcggatgcccgatgttttcgagcatcgccgtgaaacggccgtacagctcgctcaccgagacgcactcttcgatagggaaacgcgcgcagtcgcctgccgcggtcatcgcggccatctcggcatccgcgatgttcagtttaatctcgaagccgtccgcgccgaacgggatcagtccggtggtgaagccgttcgcatcggcatcgagcaccacttgcttccattcaggttgcggatccatcgattgcagcttcgcttttcccatcatctgcagcagcatatgcacggtgtcgcacgtgtcgcgccactcgccgtacgtcaatacgttcatatctatcacctcgcagccatcctacgagcggacgaagccggaaccgccagccgcggacggttcgtcagacgttcgttggcaaatcgggatgccgccgtactgcttgcccggcttattccgacgtcgcagttgagccttcgcccatgcgcgaaaggacgatcaccgacaaaacaggtacgttcggtagctgaagaagcatcggcgtgctcggctgcccgcaagccggtatcattgctcaaaatttaccactttagtaggaattaatcgaaaggagttgcgagcatgggggagatgaagaaggaagagcggggctcgtgggctgatccgagcgctctagggttgttcgggctggcgatagtcacgctcgtggcctgttctcaaaaactcggcatcaccgacgggacggcggctgtcatggggtgggccattttcctcgggggatgcgctcagcttatcgccggattgatcgatttgaggaagaacaacgcattcggcggcaccgcgtttatcgcttacgggttgttttggcttgccatggcattcggctgggcgacgaccaacggcatgttcggctcttatgcggccgaaacgttcgatccgcgccaaacaggagccgctttcgtggcgtacctcatcttgactgcgtttatgaccataggagcgctgcgtaccacgaaagtgctgttcttcatattcctcgccattgattttctgttcgtcggcttggctctaagcgcgttcggggttgctcgggaagcgacgcatatgctcgccgcggtcagcgagcttgttatttcgctcctcagcttctactgcgcgggcgccaatatcttgaacaaccacttcggggagcaattcctatcgctcggcaaccccttctggtcgaaaaaatcctgaatatcagtataactttacataagacatattatcaataaaataggtaattgaggagcggtcgggggagtttgggctggcgagcattcggaagcaaaaagcaaagcgctgcgggttccgtgcataacctgcagcgctttatgcggtttcgacagcggataagattatccccaggtcgaggtcgatcctgcagcgccgatcccggcatccgtcacagctcccgcgtaatcgccgctttccatcatctcgagtactacgggcatcatcagatagaacgaaatcgcattgagcgtgagcgccacgccgcacacggcaacgccgacgatcgccgagcgcttgagacgctgcgcaagcgcggatacgtccgtgcgcttctcgatgagcttgttcagcttgcggagcgcgatgatggcgcaggccagtcccacgccgctgagaagcacgccgccgatgaacagcgacacgggtccggccacgctcgccaccatgaccatcgtctgagcctttttcagctcgcgaaggtcgttcatgttcgacgacggaaccgggacgccgttaagcgtcgtctgccggctgcgatcgtcaggctcgcgcccgggatcgcgcccttgaggcggctcaggcggcctatgttcgttgtcagtcatgcgctctttccctatttctcaaaatttcatagccattgaactggggttttgcaaacgaggctctgagagccgttctaaggccctatttcgccttcggacgagccctaggtcatggaaatcgcggttcttcaaaccggattcggcgagtactataccacgaaggtcatcgagactttctatccgtcgacaattccacacctgcggcgctcaaccgcttcaagctctcgtcgagctcggctcgctggtactcgagcaccgtctcctgagcccgcacgatggccagccgctcgtcgcgcgtcgccgcgccgcggcgctgcaacttcacgtaatactggatgccctcgatcgacaggccgcttttccgaagcgcatcgacgaagtacagctgagccacatccgattgcgagaacgtgcggacgccgcgcgcatcgcgcgccagttggggaaagaacccgcatttgtcgtagtagcgaatcgtgaacgcggagatgcccgccatgtcggcgacttcgctgatgccgaagcatggcagcgtgttgtcggcttgagctccgtgctcgctcgcgtccatcgatgcccctttcgctcttgcttagagtaactctaagtgggtggaaggatcaggttcaaagactcacgccgctgctgccgaacccgcccgcgccgcgctccgtatccggcagctccgcgcacacgtcgaacgcggcgtcgggcacgcgcatgacgacgagctgcgctatgcggtcgccccgcttgatcgcgaactcgctctgcggatcgaggttgaccaggatggcctggatctcacctcgatagttgctgtcgatcaggccgggtgcgttgaccagcgatacgccgtgcttgatagccagcccgctgcgcggcagcacgaacccggcgtacccgctcggaatggccacggcgatgccgcatgggacgagcttgcgttcgaagggcttcaagatgtcgtcgcaggtggcgcgcagatctacgccggcatcgccgacgtaggcgtacgcaggtacgggcaggtcggggtcaatctgctgcaaaggaatcgaaacgcgctctatcaacgcaatccctccaatgcggcagcgaactcctcgacgttgcggaagtccttgtacacgctcgcgaagcgcacgtaggcgacgtcgtcgagcttggcgaggcgcacgagcaccatatcgcccagatccttcgaaccgatctcgttacgggaggcgttgcgcagctccgcttcgatgctgtcgatgagcgaggcgatctgctcgggcccgatgggccgcttcgccgcggcgttgagcaggccgcgcatgagcttctgacggtcgtaggcctccgacgatccgtcagccttgatgacgatgagcggattgtcgcccaggcgttcgtaggtggtgaaacgacgtccgcattcgaggcattcgcggcgccggcgaatggccgtgccgtcttcggaaggcctcgagtcgaccactttcgactctggattgccgcaggaaggacaacgcatacttgctcctttgccgattttgggttcagcctaacatacaatatatagtggttcaatcaacatgtcggattcgcgcaaaaaacctgcacgagaagcgctccttcctatcggacaacgcgcacgtgggtatcgcccagcccaacccccttcttcgcccgttcgacctcgaacatccagcgcacgtctgcaagcgcgtcgaggaaccgctcgtcgtgggatacgagcacgagagcgcaggcgcaatgacgcaacacgtcctgcaaggcctcgatcgagcgtatatccagatggttcgttggttcgtccatgacgatgaggcgaggcgacgagagcaggccgcgcgcgatcatgagcttgcgcacctcccccgggctcagctgctcgccgtcgagcacgcgagccggcggcgattcgagtcgcgccacgatggagagcacgcggccccgctcggccgtcgggagcgcccgcagctcgacgagcaacgcgcggacctcgtcgtcgggaagctcctgcggaaagtacgccaccccctcctccaacgtcacccggcgaagcaaggcatggagaaaggtggacttccccgccccatttttgccgacgagcccgactcgatcctcgttgcccaggtacagctcgggatgatgcagcatgcgctccgggccgagcggcatgctgcctgcggggaggcgggcgagcaccttgcggggcgcgggcgcggcgtccagctccagggagccgcggcgctccttcttcgcatcgagcgcctcgaggcgtttctcggccacgcctatgcgcttgtccatctgggacgaaagcttgcccgccttgccgtcctgtcccgtatagacggcgagcttgatcttctcccgcccgtcgcggtcgtgccggtcgagatgacgcgccgagcgccgggcggccgatcgagcggccacggcggcgcgacgatctcgctcggccttgatgcgcgccagctcgccgcgcgcctgccggcgctcggttcgcacggtatcttggcgcagctcgagctcccggcgcgcctgggtgtacgtccccggaatagcgagcgctcggccggcctcgacgaacacgcacgaccgcacaagcttgtcgagcagcgcgcgatcgtgcgatacgagcaggccgacgcccttgaaggaggagagcgcctgcgcgacgagggcgcgcgtgggagcatcgaggtggttcgtcggctcgtcgagcgccagcacctgcggttctgcggcaagcgcgcacgcgatctggatgcgcttgcgctcgccatgggacagcatagcgtagctccagagctgctcgtcctcgatttccaatagcgagcgcagcttcaccgccgtcgaaccgtagtcgcaggcgaactcctcgagcgtctccggaggcgtcgcggtcgattgccggcacaccgcgccgcgcacgcggggcgtcacggcgccttgatcgggtgccagggtgccgcagatgcagtgcacgagcgtgctcttgccagcgccgttcggcccgacgatgcccgtccagccgctcgcaaacgcgagcgagacgtcgtcgagcgcaggctggtcggcgccttcgtaggtatgggaaagatgatgggcggtaacgaacatggcgacctccgtttaagaggcgcacgggtggctctgctcagcgttcggcgatgccgatgaaggaaggccgcacggatcggaagaggaagaaacgcgaggcgaagtcgagaacgatgacgaaagcgcacccgatgcggctgattaatgaatgcaaggggtgaaaaagggctttcgttatcgcttcatgttccgtttctccttcgcgaagcgcccgtccgcatgaggatgcgtcggcgcggcatgattggctgctcgcccgagtctagcacgccgcaagcggcgcgtaaacccccgaacggacgcgcctccggggtggcggaggcgctacgcagccgcagaaacgcagcatctgcgggttatggaacggccgcgcggggccgggaaaggtctcggctagaaccctgcgaacaggctggcgagtgcgagcgccgcgaacacgcatccgccgacgaccgcctgccagcgctgcacgcggccgaacgccacgccttgcgccgaacccgtgcgcacggccgaaacgatggaggcgccgtcgcgatcgggcagaaccgcatgctgggggaacgctatgatgcgggcgcgtcgagcaggcgccgaatcgagcttcggttgaagggccgacgttccctcgacggggcagttcatctcaaaattcttcattttgtggcctcctgctcttgcgtagaacctttgttcgcgtatataataggtcgaacaaaggttcatgtcaatagaaatttcatacatttgttcgataggcgtagaggcgacgaaaggattacctatggccgagaaagtgacgaagcgccagcaagcggtgctcgactgcatcgaggagtgcattcgggagaagggatacggcccgaccgtgcgcgaggtctgccagagcctcggcctctcctccccctccaccgtgcacgtgcacttgaaggcgctcgaggagaagggtctcatcaagcgcgatccgctcaagtcgcgctccatcgctctcacctaccagctcgaagacgccgcgctggccaccaacgtggtgcagcccagcttcagcaacatcgtgaacgtgcccctcgtgggcaacgtggccgccggctcccccatcctcgccgaggagaacatcaccgacaccctgtcgcttcccaccgagatcgtgggcgacgccccgtcgttcttgctctccgtgcgcggcgagagcatgatcgaggcgggcatcaacgacggcgactacgtcgtggtcaaggagcagcccgtggcgaacaacggcgacatcgtcgtggccatcatcgacgacggggccacggtgaagcgcttcttcaaggaaagcgaccatatccgcttgcagccggagaactccacgatggatcccatcatcaccaccgactgcgccatcgccggcaaggtggtcgcggtcttccgccgcctgtagcggcgaaccgcacgctggtcgtcagcttgatcgaaccgcgaagccctgccgcaatccgaccgcttcggcagggcttttccggcttttccgaacgtgccgctgcgccggttcccgctttcgccgtccgataaggcgccgccgcagaccggccgcaagaacgaaacgcctaccctgcgacaaagcgagccgccccgggtcgatgcccggggcggctcgcttaccttagagttactctaaccgaccgtgtaaggacggaacatgctcgcgaacgaaggagccgccagcatgacgatgcgcgtgccctgctcctcatgggtttccgacaggatgtggcatctttcgtgcgccaccgacacgaggtcgccgcggttgtagggaatcagcacgtcgagatgctcgtcttgcgccgaggcgacgcgggcaacgtgcttcacgagctcgcctacgccctcccccgtcgccgccgatacgaactgagcctgcggatggcgcgctttaagggcgccgaggcgctcctcgccgagcaggtcgcacttgctgaacacgagcacgcgcgacaggtcctgcgcgtgtatctgcccgagcacgtcctcgacggcggcgatctgcgcctcgtactcgtccgacgaggcatccaccacgtgcagcacgaggtcggcgcccgtgatttcgtcgagcgtcgatttgaacgcctcgatgagcgtggtcggaagcttctggatgaacccgaccgtgtcggtgacggtgatctcgcggccctcgggaagctcgaacttgcgcgtggtggagtcgagcgtggcgaacagcttgtcgtacgccagcacgtccgcattcgtcagccggttgagcaggctcgacttgccggcgttcgtgtagccggccagcgccaccttgaacatgccgctttcgtagcggctctcgcgctggacggcgcgcacctcggccagatgcttgagctcgcgcttgatggacgtgatgcgcttgcgcaccatgcggcggtcgacctcgagctggctctcgccttcgccgaagcgcgatcccacgccgccgcccatgcggttggaggccaggtgggcccacatgccgcgcaggcgcggcagcaggtactcgttctgggcgagccgcacctgcagccgcccctccttgctggtggcgtgcagggcgaagatgtcgaggatgagtgccgtgcggtcgatgaccttcacgtcgcggcccatcgccttctcgaggttcgcctgctgggagggcgtcagctcgtcgtcgaacacgacgaggtcggccgcgtgggcgcgcgcaagctcggccacttcttcggccttgcccgtgcccacgaacgtacgcggattgggcgcgtcgagcttctgcgtagtggtggccaccgcgtcggcgcctgccgtatccacgaggcgctcgagctcggcgagcgacgatgccagcggccacgtggagccggggcgatccacgccgacgagcacggcgcgctcgcggcgctcttcggagatcggggtcatgccccgcgtgatgactgattcgaattccgtcatggatccaacctttcgatgcagagacgagcacgccggcatcggcgtgcgaagacagtcgggagcggcggcgagccgctagagaaacgcgtgcgctgtctgcatgataggtgctccgatcttgaacggttcgacggcaggagtgtgcccgtggcttcgtatcatatcacaagcgttccttcgtctagagaaaccgtcaggcaacgccgtcatcaagcagctcgagcgcttcttcgacgagcgacggaatatcgcgcgacgtcgcatcgagccaccggatgcgcgcgtccttgcgaaaccaggtgcgctgccgcttcgcgtagcggcgcgtggccagcttgatccgctccgcagcctcgtcaagagagatgaacccgtcgagagcctccacgatctccttgtacccgatagcttgcggcgccgtcacgccttcgcgaaagcccctgtcgagcagcccttccacttccgccacgaggcccgtctccaccatggcgtccacccgcgcgtcaatgcgcgcgcgcagcacgtcgggatccaccgccatgccgaagaagacggccggaaccaactgcgggatgtgagcgagcttggcgcgctgttcggcgtaggtcgtgccctcctctagcagctcgaaggcgcgcacgacgcgcttgacgtcggcgggcgggatgacggaggcgctggcctcgtcgcgcgccgccagcagctcccacagcgcctcggcgccctgctcgcgcgccagggcctggtagcgttcgcgaacggggtttcccacctgctcgcctgcgggaaagtcgtagtcgtcgacggctgcgcgcacgtagaaaccggtaccgccggccagcacgcagcggttgccgcgcgcgtcgatggcacggaagcgatcgcgcgcatagttctggaacagcgccgcggagaagggctcgcccgggtcgacgaggtcgaacccgtgatgcggcacgaggcgctcggacgcgggaagcttgcccgtgccgatgtccatgccgcggtagatctgcatggagtcggcgctgatcacctctccgcccagctcgagagccagcgcttgggcgaggtcggtcttgccggatgccgtgggcccgacgacgcagaccgccggagccttcagcggatacggtgctcccccgcccgtcggatcagcgcccgtccgcagcatcgggcccgtccacgatctcgccggcgagataccacgtcttcgcctcgtccacgcgcacgcgcacggtgctgcccgcaaggtcctccgcgcgcacgcctgccggcgccggcgcgtggacggtctggttcttcggactcttgcctgccagcaggcgctcgtcgcgcttcgacgcgccttccaccagcacgtcgaccgtgcttcccaaatcgcgctggttcgcctcgaacgcgcgctgttgcacgagatccaccaagcggtcgaaacgctgctggatcacctcgcgcggtgtgtcgtcgtccatggacgcagccggcgtgccctcgcgcttcgaatagatgaacgtgaacacctggtggtagcccacctcgtccacgaggcggtacgtgtcctcgaagtccttggcggtctcgccggggaatccgacgatgatgtcggtggacagcgcgatgtcgggtacggcgtcacgcagcttcgcgacaagcgcgcggtaatgatcgcgcgtgtagcggcggttcatggccgcaagcaccgcatccgagcccgactgcacgggaaggtgcagcgccggcatgagcgagcgcagcgtggcgaacctgccgacgacctcgtcgttaaggtccttcgggtggctggtggcgaaccgcaggcgctcgatgcccgtctggtcgagcgcgtccagcacctgagcgaagcgcggcgagccgtacaggtcgcgcccgtaggagttcacgttctgccccagcagcgtgatctccttcacgccggcagccacatagcgctcggcctcggccacgatgtcctccaacggccgcgacttctcgcgtccgcgcacgtacggaacgatgcagtacgagcagaagttgttgcagccgatggtgatgggcagccatgccgcccattcgtgctcgcgcgccgtaggcagctcggtggggaacgaggacgcggcatcgagcacctccacctgatggccgccctcttcgagcgccgcttccagcaaacgcggcagcgaccccaggttatgggtgccgaagaccacgtcgaggtgcttcagctcgtcgaccagcttctcgccatcgcgctggccgatgcatccgcccacagcgacgatgcgcttcgacagcggcgtgccggcgcgcaaggggacgttcttgagcgaggccacctggccgtacagccgcgtgtcagcggcttcacgcacgcagcaggtcatgaacgccacgatgtcggcatcctcgatggcgtccacctgcagcgctcccatgccctcgagcatgccggcgatgcgctctgagtcgtgcttgttcatctggcacccgaacgtgcggatgcagaacgtcaagttcgtaaatggtgtatgcatgggctcgttttcagcgaatctcggggactggacggtgggcatcgtcgcctagagactgcgcgacgccgcgcgtatagcgcggatccaccgtgaagcgtatggcggtgcggtactcgccgtcgatgacgatgtcggcgaacgacggtacgcaggcgatctcgatgccgatcggagacaggaagccgcgggagatggcgatggccttgaccgcctggttcaccgcaccggcgccgacggcctggatctcgacgcttacgccgtctttcaccatgccggcaatcgctccggcaacggaggcgggcgacgacttcgatgataccttcaagcagccaacgtctggcttttgttcggaagtggacatgcctatcctttgtcgttggtagtccgtgtggttcgtctcgtatgctgcgttaggattccgttgtgctatagataggttactcttacgcccttgctattctacctattcgcggtatggtgcgcaacctgcgggtatgctgttatcgagcaggttcgtcatcgtagcttttcaaccgggatgcggatgtgcacgccatccttgcccatgcgcacgtccggcttcaccgccgattccaggtagtagtcgcgcgccaaatccgagaacgcgcacgctacgcgttgcgagaacgattcgaggtcttcgggcgcgattctgagaccgcgcgcatctcccgccggcgccttcgccggccgcgcggccgggcgcgcgtcggcctccccttcgatgcggacgcggttgatcagcggctcgaccggcgcgatctcgccgtccaggatgcggcgtgcggagcgctccgagatgaccaggcccagcgcctcggcctcgtccgcgaagctcgccggatccacggccaccgacaagcgcttggccaccggcagctcggaggcatcggcgcagaacgcgcgcatagccgaggtgagcgacgacagtccgaatgcgtacagcgtcgccgcgatgtcggtgagcgaaccgaggtacacggtgcaatcgtggcggcattctatggcgaactcgcaggcggtgcgcaggatgttcttggggccgcgcaccgcgatgctgcccgattcggtgcgctcgaacacggggaagctcgactgatcggtcttctcgccgagcttgtcgaggttcgtctccacgaaaagcgcggcgcccttgcccgcgtcagaggcgacgacgcgggccgtctcggcgttgaccgcgatggagtacagcgccatgccgcggccgtggatgccccacttgtccatgtgcatgctgtcgagcttcgacgtgacgcgcggctcgaagatgcgctcgtgcatggctgccggcacgccgtcgccatcgtcgatcatgacgaggcggcggcgctgtccttcgcgcgacacggccaggaagatgctcttggcgtgcgcatcgcgggcgttgcgcagcatctcgatgacgatatcctcggtggagcggatgtcgtgcgcggcctgcctgcgctcggcttcggcgctcctcaaacggacgaagccatccccgaggtcagcctcgacccggagatggctgtcgccgcatacgttctctatgaaggcttccagcgcttcgtcggccatgccgcgcgcgccctacttcgcgacgccgaccgcgcggctctcgcggatgaccacgaccttcacctggccgggatactgcatctcgttctcgatgcgctgcgcgatgtcgtgcgcgagcaccgtggtggcggcttcgtccaccgtgtcgggctccaccatcacgcgcacctcgcgacccgcctgaatggcgtacgtgcgctccacgcctttgtacgagctggcgatctcctccagcttctcgaggcgcttcacgtaggcgtcgagcgtctccttgcgggcgccggggcgcgccgcggacacggcgtcggccgcctgcacgagcacggccagcacgctggacggctccacgtcgttgtggtgcgcctcgatggcgtgcacgatctcgggtcgctcgccgaagcggcgggccaggtcggcgccgatgacggcgtggctgccctccacctcgtggtcgaccgccttgcccaggtcgtgcagcaggccggcgcgcttggccgggatgggatccagccccagttcggaagccatgacgccggagaggtaggccacctccagcgagtggttcagcacgttctggccgtacgaggtacggtagcgcagacgacccagcgtgcgcacgagctcggggtgcagatcgtggatgccggtgtcgaacgtggcctgctcgcccgcttcctggacgcgctggttcacgaacgcctcggccttgccgaacatctcctcgatgcgcgccggatggatgcggccgtcggccacgaggttctccatcgtcacgcggccgatctcgcgacggaccgggtcgaagcacgagatggtcacgcactccggggtgtcgtcgatgatgaggttcgtgccggtcagctgctcgaacgagcggatgttacggccctcgcggccgatgatacggcccttgagatcgtcggaggggatatggatggtggacacggtggtttcggccgagtggtcggccgccacgcgctggatggcgaggctgaggatggagcgagccttcttgtcggcctccgccttcgcgcgcgcctcggcgtcgcggatgatggccgcggactcgtgcgtcacctcgtccttgagggtgtcgagcagctccgccttcgcctcgtccggcgtcatgccggccacgcgctcgaggcggtagttcacctcccgcgtggcctcttcgagatcgcgttcgcggcgctcgagctggccctgcatggatgagatctgatgctcgcgcgcgtcgagcgattcgacgcggcggtcgagcgattcctcgcgctgcgagatgcggttctcagcggaacgcacttcgcgcagacgctccttgctctcggcttgcgcatcctgcttcagcttgagagcttcgtccttcgcttcgatgatggcctcgcggcgcagcgtttcggcttgtcgtttcgcgtcgttcaccacggattcggcctcttgcgccgctcgcttcgtggatgcgttgaccaggtagcgggtgacgacgaagccgagggcgatgccgacgacggctccgatgatcagccagatgaattcgggcatacgctccccctttcgtttcagtttccgatagagcgttacattcaaaagaacataggcataaaaaatcccggaaaaaccgggcatgaacgaacgcacgcgatacgggcagcatcgtatgaatttgtctataggaagtaccctcatcaggtacgatcattcaagctataccatatgataaaggttgtgcccgaattgtaaaagccctgacaagaaataatctgaaatgcagggccgcgccgccgccgcaggcgcggccgacggcgaggatgcgctcatccttcgacggggttcgcctcgcaccagaggcgggcggcggtggatgacaccgaggcgctgaagcctttctgggcgaggcggcggtaggcggcgtcgcggcggttcttcgcgcgcggcggcttgcggtcgagcagcgcgagcgcacggtcgacctcccccgcgtcgtcgtcggcagcggccagcgcctcgacgccgtccgcgtcgatgccgaggctctcgagctcggcggcgatgccgcgtctgccgcgcccttgggcaaggcgactgcgcacgagcacgtcggcgaagcgcccgtcgtcgacgaggccgcaggcgagcgcgcgatcgagcgccgcttcgacggcctcggcctcgaagccctcgcgcgcaaggcgctggcgcagctgctcggaagcccgctcgcgcacgaggcagagccgctcgatcttgcggaaagcggcgtcgggatcggagagccgcacatcctcgtcgacttcgccggcgtcatggcgggaaggctgtccgccggccgcactggcagacagggagtgcgaagcgcggctcggccgtcgatcctcccgctcctcgcgaacgtggggaaggtcgggcgccctggaaggcttcgggacgcccttctcgatcgcggcgatctccgcgcgcagacgcgcgcggagctgttcgggcgattcgggcatgctacttcttcttcgcaggcttcgcgaccgggctcatggcgtcggcctcctcggtcgagcgcgtgatgatggggatctcgaaggattcgcgcaccttcgtctcgagttcttcgcgcaagtccgggttctccttgagcgtctgcttcgccgcctcgcgcccttggccgagacgctcctcgccgtaggtgtaccaggcgccgctcttcttggcgacccccgcctcgacggccatgtccacgatgcagccctcgcgcgagatgccctcgccgtacatgaggtcgaactcggcctggcggaacggcggggccaccttgttcttgaccaccttggcgcgcacgcggttgcccacgatctcgccgtccttcttgatggagtcgatgcggcggatgtcgatgcgcacgctggaaaagaacttgagggcgcggccgcccgtcgtggtctccgggttgccgaacatcacgccgatcttctcgcgcagctggttgatgaagatgcacgtggtgttcgacttcgacagagagcccgccagcttgcgcagcgcctgcgacatgaggcgcgcctgtaggcccaccgtggtgtcgccgatctcgccttcgatctcggcgcggggcacgagcgcggccaccgagtcgacgaccacggcgtcgatggcgcccgagcgcaccagcatgtcgcagatctccagcgcctgctcgccggtgtcgggctgcgagatgagcacttcgtcgatatcgacgcccaggcgcgcggcatagacgggatcgagcgcgtgctcggcgtcgatgaaggccacgatgccgcccatggcctgagcctccgcgatgatctgcagcgcgagcgtggtcttgccgctcgattcagggccgtacacctccacgatgcggccgcgcggcacgccgcctatgccgagcgccgcgtcgagcggcagcgcgccggtcgggatgaccccgatgttgaggtcgtgaccgccctcgccgaacttcatgatggagcccttgccgaacttggtctcgatctgatcggtggtcagcttgagcatcttcgatttttcttcgttcatgcggttccttctcttcctgccgcgagcgccaaagacgctgagcgtttgccgcttaccattatacgaacatatgtttgttggtcaagcattttcgcgaaagaagcttgcaaccccagtatagcgcggccggctcacgtcccgatggcgcgcatccagcgcgcagcacctcccgatccagcgcgtttcccacgccgaagacacgcggattccacgtttcccgccacccgatccgacgcggattccacgcgccttctacgtcgttctagcgcgtttccagcgcctcgagcgcgaactcgagcgccgcgcgcacggcgagcaggcgcacttcttcgcgcgtgccgggaaaatggcagcagcgggcgcaggtgagcgacgcgtccgcgcgcccgatccacacggtgcccaccggcttgcccggctcggccccgcccgggccggcgatgccggtcgccgacaccgccacgtcgcagccgagcgcggcgcgggcgccttcggccatggcacatgccgtctcctcgctgaccgccccgatcaaggcgagcgtctcgcggcccacgcccaacacgtcgcgcttcacgtcggaggagtagctgacgatgccaccgcgcacgacgtccgagctgcccggcacgtcggtgagcgtcgcggcgacgaggccgcccgtgaggctctcggccgtgccgacggtcgcgccggcggcacgtgccgcctcgagcacgcgcccggccagctcgtcgagcgcctcgggcgagatgctcgcggcctcctgggcgctgagcgcgcgtcctcccgcttcgtcctctcccgcatcggcagccgcggcctctccggcaccagcacggcgcttcgcgcgcttgcccgacggcgcgaacccgaggatctccttggccttcacgaaatagtcgagcatcgagatcacggtgagcgccagcgcgatcagcatggccagccacgacacgaggtacaaggggttgtgcagcacgccctgcggatcggtgatcaccacactgtccttgacgatgaacagcacgatggcgacgatctgcgcgacggtcttcgccttgccgtaccagctggcggcgataaccacgccttggctggcggccaccatgcggatgcccgacacgatgaactcgcgcgtgaggatgacgagcgctacccacgagggcagcacgcccagctcgatgagcgcgagcagggcggcggccacgaggatcttgtcggccaaggggtcgatgaacttgccgaagttcgtcacctcgccgcggctgcgcgccaggtacccgtcgaggccgtcggtggcggccagcaggatgaagatgccggcggcgatccagggcttcgacgcctcggcgtccgcccagaacgggaagtactccggccaagggctgatgatggccaccacgaacacgggaacgaggcagatgcgcagcagcgtcaccacgttcgccggggtccacagcttctcgtgcacggcaccttgcgccatcgggctcactccccttccatctcgtagagcagagcgtcgacgatgcgcacgcggcggatctcgcccggctcgccggcgtcgaggtacgtgacgccgtcgacctcgggcgcctggcacatggcccgcccgaacagctggccgtcctcttcgacgccctccaccagcacgtccatctcgcgtccgacgcgcgcggcgatgcgcgggcagcacacggcgtcggccaggtcgcgcaggcgctgggcacggtcgttcttctcgtcctcgtccagctgtccgggcaggtcgaacgcgcgcgtgccctcctcgcgcgagtacgggaacacgcccacgtagtcgaacagcccttcctcgacgaaggagcacaggtcctcgaactgctcctcggtctcgcccgggaagcccgcaatgagcgtcgtgcgcagcgtggcgcccggcacgcgcgcgagcacgcggtcgacgagcgccaggaactcctcgcgcgagccggtgcggttcatggcgcgcaggatgcccgcgtccacgtgctgcagcgggatgtcgaagtagtcgcatacgttgtcgtgcgcggccacggcatccagcagctcgtcggaaaggccttcgggctggatgtacatgatgcggaaccaggtttgcgggaactcctcggccaacgcggccacgagcgccgccaaagacgacggctcgtcgaagtcggcgccccagcgccccgtgtcctgggcgatgagcacgatctcgcgcgcgccggcctccacctgggcggcgacgtctgcgcgcacgtcgtcgagcgggaagctgcggtagcgcccgcggatgtacgggatggtgcagtacgtgcagaaccggtcgcaaccgtcggaaatcttcacgtaggcgaacggcgcggccgggagggcggcaagcgccgcacgggatccttcgacttcggcggctccgccgcttgcgctcagggtcacggaggcggcggctcccccgcccggggcgtcgacgccaagcgcgtcggctacgatagcggcgatatcgtcctcgcggctgcatggcacgaacgcgcgcgcttccacaagctcgtccgcaagatcctcgccgtagcgggcgggcatgcagccagccacgatgagcggcgcgcccgccgcgacgttgggcatcccggccgcatcgaaaacggcttcgatgctctcctcggtggcgctttggatgaacgagcaggtgttcaccaccacggcgtccgcttcggcagggtcgtcctctatcagaaacccggcctccgccaaccgcacgcgcatgcgcgccgtgtcagcctcgttcttcgcgcatcccagcgtgacgaaagcgacgcagggcgcgacgagcgccgcgtcagatgagcgttccatatggcgagaccgtcctagcggtagttgacgtactggagcggctggccgtagtccttccccttgaggaaggcgatgacctcctgcagcgcatcgcgcgagggagagctgacgcgcagcttgtcaccctcgatctggaccttcaccttgaacttctcggccttgatatccttgttgatcttgctggcaacgtccttttcgatgccttcgacgatggtggccttctgacgaacgctctggccggcagccgcttcgggatcggcccactgcacagcggcaagatcgatgccgcggcgaacgagcttcgagccgatcacgtcgatgacctgcttggccacgaaatcggcgggtgccgccaccgtcatggacttgcccgccttgtcgagggtgatctcggcgcccgagtctttcaggtcgtagcgctgcgcgagctccttcttcgcctgctggaaggcgttgtcgatctcttgcatgtcgaccgtggacacgatgtcgaagctggattccttggccatggaacgttcctttccgcgcgacacggcccgcactggcgggccgctcgaattttcgtttgcgcacagcatagcgcattttcgcgcccaagccggcaatttcagaggcgctccatgacgaacgggttctccgaccggcggaaacccctaagcggcggatgttccatccccggttttcgcgccatcctcggctgctttgtcggcggcgtccgcgtcggccgaccccttcttcttggcatccggatgatcctcgtaccacttctccaggtaggcgtcgaaatcgaccgtggccatgggcatgccggtagccggatcggagccgtcgaacttgaccgcctcgccgtccaccttgatcgtcacgccgtcgctcgcccaagcggcgaacgtccacacgtcgccctcggccagctcaacggtgtcctcctcgccgcccgagaacatctggtcttcggacgtcccgtccttcgtgatgaccgcgtacaccggggtgtccttggcgatcgtgtaggtcaccttgatgctggtcggagcagtttcaacaggctcggcctgcggttgcgcgggggtttcgccgccttccgtgccgctgccgtcctgcgtcgggtcggcgagccccgtcaccggcagcttcgtcacatcctcgttcgagctcccgccgttgttgccgaacacgagcaccagcaccacgatgagcagcacgaggatcacgccgcccgcgatgacgaaaggcagcttcgactgcacgacgctcgaggccttcggccctgcgtagaagttcgtgtactcggcgttcggcagcgccgcatggcgactgggatgcgtgcgtccctcggaatagaggcgctccgaacccccgcgcgcgccgtaatcgcgaccgtagtcgcgccggtcgtcgtacatcgtacgcccgaacgcattctgccgcggcgggcgctcgtcgacttgctgcgaggggcgagcgccctgccgcgaggtcgagcgtcccgtgcgcgaagatcctcctcgatcgaaacccgagggctgcgcgccgttgcgcgcgcgtcccacctggtaggcgtaggcctcgtccaggtacatgcgcgtcatctcggtggggttgagccccacgaggcgcgcgtaggcgttcaccatgttgcgcgcgtagccgcgcggcggcatgcgggagaaatcgtcttcctcgatagcgcgcaggatgtcgggtcggatgcgcagccgtcgcgcagccgtcgcgagatcgtagcccttgcgctcgcgcgcctctctcaatatggttccgaatgtcacctggccacctcgttactcctcagggttcgccgcgtcgtgcgcctcgaaggccttcaacgtctcgagctccatggcgtctacgagcacttcgcggggcttgctgccgttcggcggccccacgacgcccttttcctccagcatgtccattatacgcccagcgcgcgaatagcccaccttcaggcggcgctggatgttcgaggttgatccgaggccgctcgacaccacgatgtccgccgcttcccagatgagcggatcgtcgtcggagacgccgccgcccgaaccgtcgggttgcgacgcgcccagcgtgatgaggttcgtctgcaggatctcggaatggtactccggctcgccctggtctttgagcatggccaccacggcgttgatctcgtcttccgatacgtagcatccctggattcgctggggacgggcgaactcgggcttcgacagcaagagatcgcccaggccgatgaggttctcggcgcccggcgtgtccaagatgacgcggctgtcgatgccgctggccacgttgaacgagatgcggttcgtgatgttcgccttgataaggcccgtgaccacgttcgtggaagggcgctgcgtggccacgatgagatggatgccggccgcgcgcgcgagctgcgcgatgcggctgatggagaactccacctccttgcccacgttcatcatgaggtcggccagctcgtcgatgatgatgacgaggtagggcagctcggcccccagctcgccggccggcggctcttcgccggcttcgatcgctttctgctgcgcggccagctcggcctgcaccttcgcgttgtactggccgatgttgcgagcacccaccttcgagaacactttcaggcggcgctccatctcggccacgccccacgaaagcgcgctggccgcctcgcgcggctcggtgactacgggcacgtacaggtgcgggatgccgttgtagggcgtgaactccacgcgtttcgggtcgatcatgatgaagcgcacctcggaaggcgtggcgcgcatgaggatggacatgatcatggcgttgattgacaccgacttgcccgaaccggtagtgccgccgatgagcaagtggggcatcttcgcgaggtcggagacgatggagcggccctcgacgtccttgccgatgacgatctgcagcgggccctcgtccgcatctttgatgacgtcgcccaagagcacgctctggcgcgtgcggttgggcacctcgatcccgacgtagttcgtgccggggatgggcgcgaagatgcgcacgcccggtgccgccaacgcaagcgcgatgtcctgctcgagcgccgtgatgcggctgacgcgcacgcctgcgggcagatcgactttgaacagcgtcaccgtaggtccggcgacccagccaacgacttcggccatgatagcgaagctttcgagcgtctcctggagacaggccgcggtgtcggccagctcggcgtcggaagcgcggtccttcttggagttcttcgacacggccagcaggtccgcgggcggtagcacgaaaccgtccgccggacgaggagaggccaggggcgtggagctcgcggacggcttgggagccgcaggggagctatcggatttgtcgtgcttgcggccgagcttgcgcgtgagcgtttgcggggcctcgcctcccccttcctcggtagaagccgcacggttgccgatcgcttgagtgaccagcgactgcgacgcacgacggggcttgctcggtcgaccctttgcatccttggcgcgcggcaggacgttcgttgcacccgcctccacaacctcgccggtcgtgggcaccacgggaaccttcgcgcccgtcgagcgcttcatgcgggcgtagggcggagccgccagcacgtcgtcgtccgcatcgtcggcgacaagcgcccgacgggcgtcctgtacgcgttcaaccagcttcgacaccgaaaacccgatgatcacgagcccggccaggactatcccgatcatgatgatgcacgtcaccgcttgcccgaacaggctgattccaacccatgcgatgccggcgcccagatagccgcctcgcgcggcgagctcgtccgacaggaacagccggtcgacggaatcgggcgcggattcgggcgtgaagagggccagcagggagagcgcggcgacgaagatcatcacaaggcccacagccacgcgcaccggtacgcgttcgcggtcgaaacgcgcgaggaagctggctccgatgatcagcaagaggaacggcaaaagataggcgcctagacccagcgagaggtgcagcgccgtggaaacgaacgaggtgaccacggcgttcgtaggcagcaccgccgccacgaacaggacgaccgcgagcacggcgaaagccacgccggtgatatcgcgacgcgtgcgctcgtcaagcagacggggctcctccgtcgcctgcgggcgcgcgcccttggcctgcttcgcccttttttcggcgggcgaggccgccttgcccttcgatttcgtcgccgaagacgctttcggcttcgcggtgctggatgactgtcgggccacgccctactcctttatgctgcgtttgatctgcgtttcatgggtttgtttcagcctatgctgcggccgcatgcgcccccgcgagggcgcatgcggccattatagcttaaacctcgagcaagttcacaatcaccatgggacgggttttcgtgcgttcccacaggagggacagcaaggcgtcgcgtccggctttcttccactccttctggccgccgccctttcccatagcgcgcccgagcgcgttcttcacggtgccctgcgcctcgcgcacgaggaaatcgtcgtcgccgcccgtgatgccgtgcatttcgatctgcacgttgcccaccacgttctttcccttcggcgacaccgcggcggcgatggccgcaaacccctgcgaacccaaagcgttgcgctcgtcgagcacgccctgcgaggtgtcgcccaccgacaggccgtccacgaacacgatgccgctttgcacggtctcgccgcgaacgacgccctgcgacgtcagctcaaggctttcgccgttttcgcagatgaaaacattgtcggtcggcacgcccgtcgcctcggccagacgagcatgcgcgcgcaggtgcgtggcctcgccgtgcaccggcatgaacgccttgggctgcacgatggagagcacgagcttgagctcctcggcgccggcgtgacccgacacgtgcacgcgcgcgcggttcttgtcgtatacgtccgcgccgatcttcgccaggccgttgatgacgcgcgtgaccgccttctcgttgcccggaaccggcgtggccgacacgatgaccgtgtcgccttcgtccatctggatggtgcggtgctcgccgttggcgatgcgcgccagcgccgagagcggctcgccctggctgcccgtgcacatgatgaccacctgctcgggcggaatgcccttgaggtcgtatgcgtcgatgaggtccgtgtcgctgatgctgagatagcccaggcggcgcgcgatatcggtgttttggatcatcgagcggcccgtcaccaccaccttgcggccgttggctacggcggcgtcgcagatctgctgcatgcggtggatatggctggcgaacgacgcgatgatgacgcgacccttcgcctgcgatatgatcttcgccagctccttgccgacttcggcctccgacggcgtgaagttggggttctgggcgttggtggagtcgctcatcatgaggtcgacgccgatttcgctgaacttcgacagcgcgccgaagtcggtggtcacgccgtcgatgggggtctgatcgagcttgaagtcgcccgtgtgcagcacgtttccggccgggctctggaagaacacgcccacggcgcccgggatggaatggttcacggcgaagaactcggccgtgaagcagcccagcttgatctggtcgcccggtttgatctcgacgagcttggcgttcttgatcttatgctcggcgaacttgccctcgatgaggcccagcgtcatcttcgtgccgtagatgggcacgttgcgatcgaggtccttcatgaggtacgggagggttcccgtgtggtcctcgtggccgtgcgtgatgacgatgccgcgcagcttgtcggcgttctccagcacgtaggtgtagtcgggcaggatgagatcgacgcccggatggttgtcgtcgggaaacatcaggccggcgtcgtcgaggatcatgtcgcctttgcactcgaacaccgtcatgttcttgccgatggcgtcgagaccgcccagcgggatgatcttgagcgtggcgttcggatccttcttcggcgaggcgaagttgcgtcgcgcgctctggtcgccgcggttggacgcagcgcgctgaccgccctcccccgccttcgacagctgcgggcgcttgtgctcgagctgcacgtgcttgtacgtgcgggtcttcttgttgccctggccgttctcgtttccgttcgcgcggggcgctttctctcccctgcgcgggctcccgccggagcggttctccgtgcgtgcgcgatcgcttccgcgctggacgcgcgggttcttctcttccatatcgttccttttttctcaggcgacgggggcgcatgcacgaggagccgggtatcccggctggtctcgcagcaggctgaaattcgctcgagcctgcaagcccgcacgtcgcggttatatcaagcgccgcgatgcgcggcgcttcggtccttcttcatgtcgtcatcctgagcagagcgccgttggtgcggagtcgaaggattccgctcggcgccagccggggtacttcctgctatcgtcgcacgggatccttcgactccgcgctacgcgctccgctcaggatggcaaacggctacagcacgcccacctcgcgcatggtggcggccaggcgctcggactgctcgggcgtggcatccacgagcggcaggcgcacgccgcccacggggaagcccagcagcttgagcgcttccttgacgagaatggggttcgacgtttcgaacagtcccgtcatgagcggcatcaagcgctcgttggccgcctcggcggcctcccagtcacctgcagccgccagctcgacgatctccttcatgcgagcgggagacacgttgccgatggtggagatgactccggcgccgcctcgcttcatgacgtcgagcgtggcggagtcgtcgccggagtacacgacgaagccgtccggagcgcctgcgacgatggcctcgacctgatccatcttgcccgacgcctccttcacggccacgacgttgtcgcagtcgtgggcgaggcgcagcgtggtctcggcttccatgttcaccacgcagcggcccggaatgttgtacaggatgatgggcagctccaccgcgtcggcgatggtgcggaagtgacggtacatgccctcttggggaggcttgttgtagtagggcaccacgcacataaagccgtcgacacccaactcggccacgtcgcgggcgaagcccaccgtgtcggccgtgcagttgtcgcccacgttcgcgatgacggggacgcggttgcccacagcctccaccacagcgcggaacagctccatcttctgcgggtagaacacggtcgggctctcccccgtcgtgccgttgatgatgagggagtcgctgccgccgtcgacgaggcgcgcggcaagcgcctgagccttgtcaagatcgagctcgcgattctcatcgaagggcgtgaccatggccgggatcatccggccgaaccgaggctgcgacatgctctgactcctcaccttccatgcgcgcgacccgtgccgcttgcgcatccaacatacaaaaacaagtgcctgaacggctattatcccacgagatgagccctcaggccatgaagttctccaaacctacaaccagcccgtcgcacgagcccacgctacgaatgcccaacagcacgcccggcatgtacgacgtacggtcccatgagtcatgacggatggacagcgtctggccgagcgatccgaagatcacttcctggctggcgacgtagcccatcgagcgcacggaatgcaccggcacgccgtccacgagcgcgccgcgcgcgccctcggcgccttcgatctcggtctccttgccgggagcttcgctcgcgcgcccgccacgcgcttcagcgatgatctgcgccgtgcgcaccgcggtacccgaaggagcatccttcttgttgcagtggtgaaactcgatgacctcggcctccgggaagtacggcgcggcggccttggcgaactccatcatgagcaccgcgcccgtcgtgaagttcggcgcgtagaacagacaggtgccgtcgggcgcgagcgcggccagctcctgcaacgtctcgttcgacaggccggtagtgcccaccacgcagtcgactcccgcgggaagcgcctcgcgcaggttgtcggccacgacggaaggctgggtgaagtcgacgagcacatcggccgtccaagactcgagcgcggccgccaccgtcgggtacacggggaagtcgacctcgggcctgtgcgggtcgatgccgcacaccagttccatatcgttcgccgcgcgcaccgcgtcgcatacggtcctgcccatacggcccgcgcatcccgcaactgccaccttgatcatcgctgcctgcctttcgcttcatgtacccgaacatcctaccacgcggatatacgccgcttgcgccgccgttacccggccggcacgattcgtcggccatccgtcctcccgcaacgacgaaggggccgcgttcggccccttcgctcgaatcaaaaccgcttacgcgtcgtgacggcggcgcggcgtgcggttgccgcctccgttgccctcgcgtccgctgcgacccggacgattgtcgcggccgccgttgcgatcgccgcgctcgcgacgctcgccgttggaagcgctgctttcgggggcgtccggcttgtcgaggcggtcgagcgatatcttgcccgtcttcgggtccacctcgagcacctcgactttgatgatgtcgccgaggttcagcacgtcctcgaccttgccgacgcggccgttggcaacgcgggagatgtgcagcaggccgtccttgcccggcgtcagcttgacgaacgcgccgaagtccttgatgccaacgacctcaccgtcgaacgtctcgcccacctcgggctccttgacgatgccgagaatcatggccttcgcggcatcgccggccgggccctcgatggcggcgatgtggatggtgccgtcctcctcgatgttgatgctggcgcccgtctcctcctggatgccgcggacgaccttgccgcccgagccgatgacgtcgcggatcttgtccaccgggatgtggatggtctcgatgcgcggtgcgaactcggagagctcctcgcgcggcgcggcgatggtctccagcatggcgtctaggatgtaggcgcgaccttcgctggcctgcttgagcgcacgagcgaggatgtcgaccgacaggccgcgggccttgttgtccatctgcagggcggtgatgcccttcgccgtgccgcacaccttgaagtccatgtcgccgaggaagtcctcgatgccctggatgtcggagaggatgaccacgtcgtcgccctccttgatgaggcccatggcgatgcccgaaacaggcgccttgataggcacgcccgcgtccatgagagccagcgtcgaaccgcaggtggaggccatggacgacgagccgttcgactcgaggacctcggacaccacgcggatggcgtaggggaactcgtcttcgctgggaagcaccgggatcagcgcgcgctcggccagcgcgccgtggccgatctcgcggcgcttcggagcgcccatgcggccggtctcgcccgtgcagtacggcgggaagttgtactggtgcatgtagcgcttgccctcggcggggtcgatggtgtcgaggcgctgccattcgttcagcatgccgagcgtgcagacggagagcgcctgcgtctggccgcgctggaacaggcccgagccgtgcacgcggggcaggtagcccggcacgatgtacagcgggcggatgtcctcgggacgacggccgtcggcgcgctcgcccgtctcgatgaccatcgcgcgcatggccttcttctcgagcttcttgagctcggcggcgatgtcgcccttccatgcggcgcgctcctcatcggagaactgctcctccttgatgcgggccttgagctcttccaccttgcccatgcgcgaaagcttgtcggcatcgcgcaacgcggcggacatctcggccatgaacggcgcgacgcgctcggcgatggccgggtcggcgacgtggacgggccactcgaccggctcgatgttcgcacggtcgaggaagcgctgctgggcttcgcagaacgcggcgatggcctcctggccgaacgtcatggcggccagcatgtcctcttcggagatctcgtcggcgccggcctccaccatggagatgtagtcggccgtgccggcgatggtcagctcgagatccgagttctcggattcctcgaacgtggggttcacgatgaactcgcccgtctccacgtcgcggccgatgcgcacgcaagcggcggggccgtcgaagggagccgcgcccagcatgagggcagcgctggcgcccatgacgcagatggtgtcgggcgggttgatgctgtcgacgacgagcgtcgtgcacacgacgtgcacctcgcgcttgaagccgtcggcgaagccgggacggatgggacggtccaccatgcgggccgtcagcgtgcccttgtcggaaggacgcgcctcgcgcttgaggtagcctcccgggatgcggccgaccgcgtacatcttctcgatgaagtcgaccgtgagggggaagaagtcgtagtccttctcctccttcgagatgacggccgtaacgagcaccgtcgtgtcgccctgcgtgacgacgaccgagccggtcgcctgcttggcgagctcgcctgtctccaaacggtactgcttcccgtacagttcgaaggattcgacgatttttttcatatgctgctttctttctcttcacctgaacgaccctagtgccgcccagcttcttcggcgcggggtacttaccgttcccccgccgccgcgagcggatgcgcccttgcgcttccgaccgcctctatgtaaaagcccgccaaggcgggctttcatacgctagatggtgtcgcggatgccgagctgcttgatgagcgtacggtactcctcgatgttgcggttcttgatgtacttcagaagaccgcgacgcttaccgaggagcatcatgaggcctcgacgagtgtggttgtccttcttgtgcaccttgagatgctcggtgaggttgcggatgcgctcggtgaggatcgccacctgcacttcgggactgcccgaatcgccttcgcccttgccgaattccttgacgagctcggcagtgcgctctttgctgatgctgagtttgctggccatgtgctattccacctttcgttcgcagcgccctcgtcggacgccgcctcctgcgcgcctgcccggcccgggcctgcacgcgtcgtatgcgcgtccctctgggtaggcatgcggtgaacatgcggaccaagcggaacgtgcctgcgttttcgcagcccgcctattgtaacggcaagcacggtgcgcggcaagcgggacgcggggcgcccacaggttccgcacaaagcgccgacgcttcgaagccgcgcccccatcaggacagacgcatgctgcagaaggcctccgtcaggagcgcgccacactgggtccctgggggatccagacggtgaacgacgtgaggcccgcgtcgctcgaagcgtagatgtcgccgccgtgggcgcgggcgatctcacgggagatggccagccccagccctgcgccgcccgctgccgacccgcgcgactcgtcggcgcggtagaacttctcgaagatgcgttcgaggtgctgcggcgacagctcgcgtccctggtcgctcaccgtgagctcccaccacacgaagccgtcggcggccgtcacgagccccgtgcgcaccctcacgtccgtgcccgggtcggcgtaggccaccgcgttcttgatgacgttgttcagcacgcgggccacgcgccccgcgtcggcgaacacggacagctcggcggggccctcgtacacgaggttcaggcgccgcccctcggccagggggaagaactcgtccaccacctggttcacgaacagcgcggcgtcgaagcgcgaacgctcgatggggatggtctgcaggttgtagcgcgtgatctcgaagaactcgtcgagcagctcctcgagccggtaggccttgtccaacgtgatgcccgtgtagcgctcacgcacctcgagcggcaggtccggagactcctcgagcagcgtaagatagccgatgatggaggtgagcggcgtcttgatatcatgcgccagatacaccaccagctcgttcttgcgatcctcggcggccttcgcagcgcgttcgttctgctcggacgtcgccttgatggtgttgagcgccatagcggtgggcgcaagctcgccgggcagcatgaccgggccgtcgcttttggccaggatgtcggacaccgaatcgagcaagaggtcgaagtagcgcagcgcccggttgatgcccgagcgcaccacgagcacgatacccgcgacgaagccgatagccgtcaagaccaggaacaggttcgacgcaagggtgtgcagcgcgtagtcgtagccgagcagctcgtagacgaagttcgacacggccgatccgagcgtggtcatgaagccggcgaacagcacgaggtacacgacgatgaacagcacgacgttcaccaccgtgcgacgcaggatggcgttcgagagccgcttcgtctggtcgagccgcgcctgcgagcgtacgggttcctccatgtcttcctccttttagcccagcttgtaaccgacgccccagacggtctcgacgaactcctgggacgagtcgacggcagccagcttcttgcgcagatgccggatgtgcaccatcaccgtgttgttgctctgggcgttggcgatctcgccccagacggtctcgaacagatcgcgcgaggccacaggccggctctggtcgcgcatgagacaggcgaggatggcgaactccttcggggtgaggctcaacgcctcgccgtgcagcgtggccgtgtaggcgctctcgtcgagcgcgatgccgcagcattcgagcatacccggcccatcctcccttgcgacgtcgttcgaggtagcgcggcgcaggcgcgcgcggacgcgggccacgagctcgcgcggcttgaagggcttcaccacgtagtcgtcggcacccagctcgaagcccaccaccttgtcgacctcctcgtccttcgccgtgaggaagattatgggaaccgagctcgtgcgccgaagctcgcgacagcacgcgaacccgtccatgccgggcatcatgatgtcgaggatgacaaggtcgaacggatcgtccgcctgacaggccagcagatcgggagctgcgtagaacaccgtcgggacgaacccggcctccacaagcagctgccccaccaaatcggcgatggcctgctcgtcgtcgcatacggcgatgcgcatcttcgattccacgcgttcctcctcgcactccgctgcccatcgggctgtccgcgcccgctcgggcgcgccgtctctcccattgtataagccccgtgcgcgatcgcgcccctgacgaggcaagattaaggaaaacttaagcaaattagtattttctaagaacgacaagcgcgtgaactgcggttttagcaacgacaacaacgcaaagtacgtgaaaaacggtaacttgggatattagtgggatatggaatcggcgcagaaaacggaggcccgcgcactgaaaacgagccctaaacgcgaaaaagggccgccccctcgaaaggagacggccctgcgcacgagaagggtgcgtagcgagatcgccattgtagcacgggcggctacccaagcaccatgtccccgccctcggcggtcggcacctcgccggagatcatcgcccccgacgcgccgaatgcgtaccacttgccgccgatgctgcggcacgtggactcggccatggcgccggagtcgtccagccagtaccaggtgccgccaagcttcagccagccggtctgcatggcgcccgaaccgtcgagccagtaccattttccgtccaccttgcgccagccggtggccatcgcgccggagtcgtcgaggtagtaccacttgccgccgacgagctgccagcccgtgagcatgcggcagtcgtcgccgagcaggtaccacttgccgccgacctcgcgccagccggtcgcggcgtagccgtcgtcgtcgaaccggtaccacgcgtcgagcagcagccactcgcccgccggccacgagccgtcggagcggcggtaccaccagcccttggagtccttgacccactcgccgcccgacgcgccgccgaccacggcgtcggcgatggcgcgcgcgatggcggcaggccccacgcggttgtaggcggcctcgtccgcgcggtggtcgacgaagcacacctcgacgagcaccgccgtcatgtccgtgccgttgagccagccgaggtcgccgcgctgcttcgcgccccggttcgggatgcgcatgagcgaggcgagcgcggagctgatcctcgcggcgacgcgctcgccctcgccgcccgcgctcgccgggtggtacagcgcctcgcagcccgtgccgccgcccgcgttgagatggatgctgatccccagctcggcgccgctcgcgttggcgcgcgcaacctgggcgtccagctcctcggggtacggcatccggtcgtcggccgtgcagtcggtcacggtgtggccgcgcgcgcggagctcggcgatcagcgcgtccttgaccgcgcggtcgcatttgacctcgtcgaggtacttgcgcgcgccggggctggtcggcgtgtgcccgccgttgacggtgatcttcatcgcccatcgcctcctcgcggctcgtcgtaccccatcgcgcgcgtgctgtcggccattccggcggtcgtggggtcgaccacgatgccgagcgcggccagcacggagacgagcgacacgacgaggttcatggcctgctcctgcgtgacgctcggagcgacccccagcgccgccagcacgccgtaggccgccgtgacgagcaccgtcgccagcgtcagcagcgtagccttgttctgcagccgcagcttccagttgatcttcttcatctcttcgtcctctctagcaagacctgcatgtccgtctctatcctgtccagcttcgcggcgttgcgctcggcctggcgggcgtcgtcgtcgagcttgcgcgacacctgcccgatcatccgggtcgaggagtcaagcgccgaggcgacccgctccgacacgtcgttgctgcggtcgatggcctgtatccactggccctcggtgcgagcgcgctcctcgctctcgcgcgactttcggcgctcgcgctcctcctccaccgccgcccgcctgtccatgtaggccgtccaggtgggcacgcccttggcgagcagcacggcggcggcgaccacgaccatggccgccacgatccacgcaggcccctcgcgggctatggctaccgacagggcggtcatcgcctcctcgtagggcatctataccgccccctcggcctcggccgccgccagcgccgcctccacgagggggcggatcgccgccggcacgtcctccagggcgatcgccccgcgctcgatgcggcgcgcgtacgcctttgcaatcgcgtccattcactcacctcccaacgtcatctcgtacagggcgcagatggccgcgtcctggtcttccacggtggcttgcagggccaggctggcctcgtacaccgcgcacagcgcgtcgtcggtgtcggcctgggcggcctcggccgcctcgacgcgcgcgggcgcggagctgaggaacgcctcgcgctccgccgcctcggcctccatgcgcttgcgctcggcctccaaccgcgccatctccgcgagctcctcgtccgtgtacggcgtgtagagcatgtagctctgcgcgtccgtcacctcaagctcgtgcggcatgtctccggggatcacgccgtcgaactcgatcagctctccgtcctcaaggcgcgtctcccaatgcccctgctcctcgacgtcgacgacgatctccacgtccttgccgcccgtctcggggtactctgctataacctcctcgtggctctgctcctccacgtcgacgacgtacctgtgcacgacggggcgctggcgctcttccaagcgcccggatttcagatcaggatccgcgacggtcgcgccgctctcgtccaataccagcatgcgtcctccctacttttaagccgtcctgcgccacacgtacacgtcctggtacgcgggcatgttgttgtgcgagctgtcactgccgaccgatgtggtcttgatgcccttgttggctcccggagtgctgttggacacgacccaccagaggccgccttccgacacgttcgactgccagagccccatccagtcgccgtcgcgctcgctgatgaccccgtggtgatggttcggcatctgcccagatgtgagcgtgcaggtgtcgctgccgcccgtgcccgttccgctcgcggcgcgcaggaacctgccggtgatctgcgcccacgtgcctccgaagagggacgcggggctggttgcgctgaagctgacgtagagcgcgcccacggggtacgacttgagcgcgatggccgcgtccgtcgtgacgcccgtgccgccgttggcgacgggcagcgctcccgccgtgttgccgaggccgagcgcgtttcgggcgcccgccgccgaggtcgcgcccgtgccgccgagcgagatcggcagcgcgccgccggtcatgtcggagacggggtgcttgtgggccttgtcggccttccccgcgaggtccgcgaacgcctcggacaggctcccgagcgtgccgtagagcggcaccggagcgccgaccgagagcccgtcgatgggcacgcggtagagcgggcggaacacctcggcgtcgcccttgaggatcgacgccgaggcgttgtaggccggatcagccggggagtcgggcaccgcggcgcccttgagcacgtgcagcggcgcgtcctcgatgtcctggttcgcggcgtcgcgcctgtacaggatgccgatcaggtcgtgcctcttcctcgcctgcgcgccgttgtctatcgccacggactcgcccgaggcgccgaccctgatatggcggccgtgcatgaggatctcccctcccgcgatggtcaccttgttcgcgctcaccaccgtggcggcgcatcccgagagcacgtacaggccggagccgaacacggcggcgttcagcgcgccgtcgtctccggagccgacgtgcagctccatcttcttcgcggtgacgatgtgcgtcatccggcaccgcctccttccttcgattttccgattctcacgtccgtcctcctaggccgtccgcctccacgcgtacacgtcctggtacgcgggcatgttgttgtgcgacccgccgccgccgaccgatgtggtcttgatgcccttgttggctcccggagtgctgttggacacgacccaccagaggccgccttccgacacgttcgactgccagagccccatccagtcgccgtcgcgctcgctgatgaccccgtggtgatggttcggcatctgcccagatgtgagcgtgcaggtgtcgctgccgcccgtgcccgttccgctcgcggcgcgcaggaacctgccggtgatctgcgcccacgtgcctccgaagagggacgcggggctggttgcgctgaagctcaggtagagcgcgccgaccgggtaggcctcgagcgcggacttccgccatccgtgcgaccacccgctgccgttgccgctgcgcacgtagaggtcgccggacgactgcggatgccacagctgccacacgtcgccgccccggacgtagctgaccaggaacccgtactggctcggctggccgctcagctggccggcgacgctgtaccacgcgtagccgcttccgagcgacgtccacgcgccaaccgtgtcgcccgcgacggtcttgaccgggttgtcgcccaagaatgacaggccgtcgaaggcccccttgcggctggtcgacccggtgcctccgcgcgctatcgcgagcgccccgctcgctatgtccgccgccgagtgggtgtgcgcagccgggacaccggcggcgggcacggcccacgcgccgtcgccgcgcaggaacgacgcctgcttgccggcggcgggggcgggcaccaggccggcccttcccgcagcgctcgcggtcgccccggccatggccgagtaagtcgtgttgttgtcggccccccagaccgccgtcccgtccgcaccccatcggagtatctggccggacgagcctcccgccggcacgtgcttgttgcccggcgttgcggggtgggtgtacacggtgttggtgtccggcggaacctgccacgtgccgtcgcttcgcaggtaccgcgtcgccgccccggcggcgggcgcggggacgaacccggccgcccccgccgcagacgcgctcgcccccgtcatggcgccgtggccgtgcgacgatgcggcggcgcctatgctcgcccgggcggcggccgcgtcgggcgctatcgcccacgtcctctgccacgccccccacgacgcgccggcgttggtgctcacgcgcatccagacgatgttggcgttgtactgccggatcgtctgggataggtacgtgccgtgcccgagaacctggtcaacgatcatgtggaagctgacgccgccggtcgggcagttggcgagcgtcttcgcgttggcgtcggcgttgcaggtgtagctcccgggcgtcttgtaggcgttgaggtcggcgttggccggtacgacgcgcttcgcgcccatgctcgccgccatgagcgagtcgcaggccgcctgcgccgaagagcctccggtgccgccccttgcgagcggcagcgtgccgacggtcacgtccgcggcggagtgaccgtgcgccgacggcgggaacgcagtcggcttgccggtcacgtccgcccacgggtggccgtgcgcggccggcgcgaacgtagcgggcttgcccgtaacgtccgcccacggatggctatgggctgacggggcgaagctcgtaggcttcccagccacgtccccccactggtgcgcatgggctttggccgcgtacgccgcatcgtggttgtgggacgcgtccgacttgccggacagcttcgcgtccatctcggactcggtgtagtacctgtcatcgtgcgcatgggccgacggcgggtagctcgcgggcttgcccgtgatcgcgtcccaggcatgggagtgcgcggacggcgcgaacgtagcgggcttgccgctgatcgcgtcccacgggtaagcgtcgatcttcttcttgtcgtcggcgctcatcagccccttcgcgctcggcgtcgcgacggatgacggcatgacgagcctgcgccccgcggcctccttgacgtgccccgagccgtcgatgacgaggcgggatcccaccgtggcggcctcgccccacgaaggagacgagtcggcggccgggccgtacgagcctcccgacacgccggacgcggcgtgcgagacggtcacgatcccgcccgattccgccgcgaccacgggggacgcgcccctgaccgacttgacggcggcggccgcgaccttgccagccgactcggccttggcctcgacctcggcgagcttctcgttcgtcacgtcggcggagatggtggcgccgtcgatgcggatgccgtcccccgccttgtagacgatgccggccgacgcgccctggtagtatccctcctccgtccggcgcaccgttatgtcgccgatctcgttggacacctccggcgcgccgctcccgccgatcctgacgacgaccttggtgacgtcggacacgaccgacacgccggtctcgtcatcgatcacacccacgacgtcgccgacgtcgaacgactcgtcctcgggcagccgaagctcgcacatgctcgtcgcctggagctccttgagcttcttcgcgccctcctcggcgagctcgtcggcctcccggttgctcagctcgtagacgtactggcgctcgtcgaggccgaacagcgtctggacgctcgacacgttgccgtcggcgtcggcgtagaggtggacgacggcgcgctcggcgaggtcgcccatccccaggcatatgatgtggttgtacggggtgcccaccctcagctcgtatccgtacctctgggagctgccgtcgtcgacgtggcttccgacctcgaccgccgacagctctggcttcctcccgggctccttggatatgcgcagcttcgcgcccgacctcctgagcatcttgcggatgctcgagtacgagtcggcgaaccgctcgtgccggtagctcacgcgaaagccgctgtcctcgggcgacacgtcgaagaggtcgccgaggccctggcgcgccacgagagcccgcaaagccgcgttcgcctctcccgacgactcgtagtagtccgcacccgcgtcggggcagatgcacgattcggcgagcacgccgtgccacgtctggcccgtgatcgtgttggtcggggactcgccgagggtggacgggcgacagcccctcacgacgccgccccattcggtgccgtcgatgtacacgagcgacttcttcggcaggtggaaatcgatcggcacggtcagcgcgaagtcgttctcgtcgctgccgtacgccaggtcgagcgagtaggagccgagcatcccgatctcgaccccgtcctcgtcggtgtaggtcaccttcagccgctccaaccgctccacctcctctcgtccctcttctcgtggatgaccaggtcgaagccgaacgacccgtcccacatgacggacgagacgccgggcggcaccggctcgaacacgtacgagccgccgccctttttctggttcccgcgacggcggtggaagacgttctcggccgttccgtcgccgtgcacgagcgttatggtcggcgtgcgcgccgccccgtcgatgacgaggtggccgccgtccggcaccgacacctccacctcgtagcggttcccggcgacgatcacgtaggggttcgccgccggcccgtacaccacgatcttcgccgccgaagggagaaacgacgggttctcgagcgccaccgaccccatggtggtgccgtagctgtgcgggtagtcgcgggggtaggtgaggcctccgtccctgttcgacccgggcgcgaacgacagggagtgctcgagcgtccagcgcgggtcgtcggacgcgaacgtgagctcgtagtcggcggccgcgcccgagtaccagtagcggtccttcctcgaccccacgacgaagccggacatgtaccagtcgccgacgtagagcctgccgggcttagccgcctccacgtcgacggcggcggcctcgtagatctcgtcgcgcttggcgagcccttcggcgcccgtgtcgcagatgatcgccgcgacggccgggatctcccgaggctcccggaaaaacgacgctatgcggccgttgaggatcgcgtaccctatcgaccagtcggacagctcgccgctggagaggtaggcgccgtctccgttgaggtcgaccgagcgtccgaggtggttcacgtacttcgcgccctccctcatagcgacatcaccttcctaatcgtcctggcgaactccttctccccgaccttcatcacaacgtcgggctgctcggacagcgcagccctcatggcggcgtaggtggccttgcgcacgtcggcctgggtgagcgagcctggagcctggacgttgacgaccgtctggggcgagagcgacgagcgcgcggccgaaaccgccgcgttcgcagcgccgcccccaacggcctccaagcgcatcttgaccgcgttggccctgccggaagcgtcggccatgccgtcgtacgccgacatggcgaggtcgtagcccgcctcgtacaggtcgtccgcgccgtcctccaacggcatggcgaagccttcgacgaagaacccgcccagcttcttagcctccttcgagggggacgctattcccagggcgctctctatagcgctcagggcagagcgcccgatccggtaggcggcgtcccatatgctcacgccgtagaagccgttgacgaagccctgcacgaagttggtgccggttccgttggcgcttacgcttccgaggccgtccctggcctcgcgggcgactcccgcgcccttcgtcctggctgcccagccctggccgccgacgttcgaggcgaactgcgatccgagcctcgtgcccgagctcgcgtccccggttccgagcccggacgaagccgatcccgccacggatcgcgcgctcgtcctcgcgttgcccgcctggtcgccgagcagccttgagaacgcgccgcccagcacgccgcccgggctggcgtctccggtcttgaggcctgccgtcgcagcggcggcgaccgccttgccctggcccttcgcgttgccgtcctgcgacccgacgccgtcggcgtagtcggcccccgtcgactcgcctatgccgaacgacccttcgacggccagcccgagcgcctccatcaccgcgccgccgagcgcggccgccgcgcttcccggctcgtcggagccgtcgatgccctcggcgaggccggcgggaacggtctcgccggccgcccgcgccctgcgcgacgggctgtgcgcgtcgagcgcctccatgatggcggcgatgacgtcgtctccgagcccggcggctgcgagctctgccgcgaagccgtctcccatgccctcggccatgccctgcgtaacggctacgccggtctcgctgtagtcggttccggtgagctcgctcaccaccttctcgccgagcgacccggcggcgaaggtcacggcgcccgcgctcgcgtacatcccgtcggcgatctcgccgggtatcgctatcccgtagcttccggcgatgtccacggccctcgccatgtccccgtcgaacccggcgaccagggcctcgaacgaggcgtacgcgctcggagcgccctcgtcgatgccctctgacagcctgagcgcggcgatcacgccggcgtcgccgttgagggccacgaactcgtcgagcttcgccttgatggcgtccgtgttgccgccgtaggcttccacgagcagcgcaagctggtcggccgacagcctgcggaagtcctcggtcgacgccccggcttcggcgagcttgcgggcgagctcttccgagtcggttcccgcgttgaatagggcgagcctcacgtcgtcggcgtacagcgacgcgctgcccctcatgccctcgaacgactcctgggtcttgaccttggcgtcgtccacgccgacgcggtactccgacagcagccccgcgatggacgagtacgtcccgtcgtagctcgatgcgaggctcgacagctgctcctcgttgagcttagcgaggtcggcgacgctcgccccgacgccttggagggtgccggagaagtcgaggcagctttggccggcgccttggagcgacgcgagcaggaagtcgttgctggcgacgtactcgctcacgctccccttgccctcgctcatggcctgggaaagcaggagctgctcgtccttgagcagggacatggagtcgcgcgaggcggacagcacggcgttcgcctcgttcatcgccctttcggcgtccctcacgccagcttcgtactcggcgctcgtctcgatggcccgctgatcgccctcgcggacgaggcgctggttctcctcgcgatcctcgagcgccttgttgtaagcggccgtggcgtccgccgcaaccctggcgttgtcggcgatggccttgtacgactgctcgtaggcctccttcccggcgtcgaagcgtatctgcatctcctgagcgtcgatgagctcgatgatcgcgtccttggcctcgaccgcgccgtccttcatgacgacgtacgcgccgccggcgtccttgaccacctcgtagttcgtcccgcacgcgtcgttcacgccgtcgaccgcgagcctgagctccgcctgcttctgtgccgacaggtcgctcttgccggcgagctcctcgatcacgcccttgtacgagtccagcaggccgacgctcttcccggcctcctcgaacgattccctgatcgagtcggcaagctcggcctgtttctcgacggccttgtcgatctcggccctcacgtcggaaaggctcttggcgtacccgtcggccgacccgctcgcctcgacggcggcgtcgcgcgtcgacaggtacgcgccgttcatcgaccccatggagtccctgagcccgtccgtcgccttttcgagcttcgcctggtggtcgacgcacttcacgatctccgcgacgacgagcgcgatgccggcgacggcgagccctatcgccgccgccttcgcggctcccatcgcgacggacgacctgcctatcgcgtcggcctgcttcttcgccgcgtccgccgacgccttcgcctcggcggaatgcctcttcaacgcggcttgcgacgccttcgtctcggccgtgtagcccttgatcgagcgccccgccatggaggtcttctcgtcgaccgtcgcgagcatcttggcgaccttctggagcccggtgccgaacggctcgatgctcttgacccccttgccgaccaggctgagcatcggacccagcgcggccgagagcgcgacggcctgcaggacggccttctgctcgctatcgctcatctcgctgaaccgcttcgccccgtcggcgatcatcttgatgagcggctcggcctggtccacgatgtcgagcagcgcgctcgcgagaggcccgccgacgtcttcggcgagcgcgaccacccggttcttgagcatctcgaactgcgcggcgagcgaccggttgcggttgtcgacctcgttctgcaaggccgtgttcttgccccactcgtcgttcgccttcgccacggcgtccgcgacgaactgcgagttgccggcaaggcgcttcatgacgtcggtctggcgtatgctgtcgatgccgagctcctggagcatgaccgacatgttcccgccctcggcggtagccgcctccatgttggacagcagcgccgagagggcctgcacggggtcggccctccacgcgtccgcgaagtcccgggcagacatgccggccgtcgatgcccacgtctccacggcctcggagttgagggcgatgtccttgtcgatctgcgccatgatcgtgctgatcgccgtgccgcccgcctcggcctcgacgcccatcgacgcgagcgcggtggcgaggcccaggatgtcttcctgggacatatgcacctgcgtgccggctgcggctatgcgcatcgccatggacgagatgtccgattcggtcgtggcgaagctgtttcccagcccgacgatggccgatccgtagttgcggatctccccgcgcgacatcttggtgatgttcgcgaactgcgccatctcggtcgcagcctgctccgctcccatgttggtggcgatgtcgaggccggacactacctgcccgaactcgtccagctcgtcgatagcgaacccgagctgcgcgccgagcgcctgtatgtcgaggatctgcgaggcgctcacggcgttggtcagggagaactcgatggccgcttccttgagcgcctggtactgctcctcggttccgtccacggtcttgcgcacgttggtgaggttcgtgtcgatgtcgacggccgcggccaccgtggcggcgcctgctgccaggacggcgggcgtgagcgtgcgcgagagcttgccgcccatcgattcgatcatctcgcccgcgggcttcacgcgcctcccgaagctttccagcccctccccgagctttccgatggcggaatgggcgacgccctgctcgatgcggaagtcggcgagcgccctcttggccgcttcgaggctcctgctcgtggcgacgatctcgcgctggaggctctcgaagtccttggcctcttcctcggttcgcggcccgagctgctcggagtacgccttctcgaggtcttgcagctctttgagcttgtcagcctggtcttccagggcctcgttgagcttccgctgcttctgctccaggagcaccacgttcttggggtcgtactcgaggagcgtggtgacgcctctcagctccctttgcagcttcttcgcgtcggtgttgacggtcgctatggccttggaaagcttcgtcacgttgccgtcgatctcgacggtcaggcccttgatgttgcccgccattcgcttctccccctctccgtcctaaccgtcgccgaagacggcccgcgacttgtcgcggtcgttgtccgtccggctcagaagccatgctttgttcaggtactcgcggccctgctcggtcgcgttgagcttcgctatgaacgcgtcgcgcaggatgacgcggtattcgatgtagtccatctcttcgacgtcgaagagcgcgacgcgcgcgtagtcggcgacgagcttctccgcgctcgtctctacggcgtagctgtgccccggctcctcttcgttcggataccagggcatttctagttttttggtttcgccagctccttgacgaagcacgcgaacgcgttcgcgaattcgagcacgtccacgacatcgaagccctcggcttcgaggcgctcggcgctcaccctcgtcagagacgtgttgttgctcatgacgttcgcgaccaccgacaggagatcgccgaggtcggcgcactcgtcctcgcccgacgcgacgcgggctaggacgccgcagagcgcggtcatgtcctcgtacatcgccttcgtcggcggcaggatgctcacggtcagctcttcgtccccttcgccgatggtcagcttgagcacgtcctttcgcgtcttgagcctcgcctctgcgattgtcgccatatgcattcgtctcctttcggggaaaaagcggggagggcgccgtttccagcgccctccccggtgcatcccgcgtcgctccgccctagccctcggcggccacgatctcctcgatgtacttgatcagcgtgccctcggcgtccatcgtctcggcggtgaacgtcgggttgacggtggtttccgcgtcgggcttgtaggcgagcgagaagcccgccgtgttcttgccgacgatgacgtaccagcagtctccgtccaccttgtccacatggtgcaggcacagcacgtaggacttcccgttgtcgtttccgatgccgccgatcttgacgatgcgcttgttgccgaccgtggtcacgcgtgcggtggacgcgagcttgtcgagcgtgccgccgttccacgtgatgatcccgagcgcgacggtcgccccgtcctcggtgatgatcgtcttggacttccttccgaggtcgtccttgtacgtcgcgctcgactgggtgtactcgatggtcgcgcccgacttgatccagccgaggtggttcttctcgacgcagatctcctccacctcggggacggttccggcgtactccatgaggtacgcgatcgcgctccccacggtgatgacatccgggttggttcgcttcatgttcgccatgctcatattcctttcttgactgacagcgagtagtagaacgccgtcatgtaggttttctcgctttcgatccagaccggttccgatctgtcgttcgggacgcctgccgcgtcgagggcgcgcgccaccgactcgacggccggatcctgggacttggacgtgtacacctcgaccgtgacgctgtgatcctcgatcaggttcttcagatcggctccgcgcgacgtcgcttcgtcgagcacgacggcgtagggcttcgccggcgccttcttcgggtaccagccgccgtagcagtgctcgatcccggaggcccgcatgatctcatcggctatcacgtcatctcctcctcgatgttcttgaggacgttcctgtccgcgttgtcgcgggcgtccctcagaaacgggttcgctttcgtgcgcttgccgtcgaccgtcgcgtgcccgtcggcgagcaggtgggtcaggcggtgctccggcgccctcacgtgccacgtctccttccagccgtccgtgccgaccggctcgccggtgtgggcgatatgcgactggtaggttccgtgcgggcgcgccgacgggtaggcgtggtcgaacttcgcggccttcgtctccttgaccatctgcttcatggtcttttggatgccggccttgttcgcctgcctcatgtccccgacgaaaggcttcaggatctcctcctcgagcacggcggccagcgattcgacgtcgcaatcagccatcgtaggacacccccgtcagcctcacggtcgcccggcgctccatgtagtcgtcgtagcccgtcacgttgaacgcgcggcctcggtagacgatgcggtgctgggacgtgttaaacctgatctcctcgacccgcttgctccatctgacagtgaagtcgacggacgccgcagagtgctcgcttccggcctcggcgtactcgctcgatctcgtctggttgatcttgaggcagtgcagcgaggcgtataccgcccagtcgccgttttcgtcgatcttctcgaccgttatgggtgctccgacatccatcagacgtcaccgccgtacttgcatcgcagctgcatggcgaagtccgctgccatcctgttgagggcggctgtggcttttgagttgataccgcccttctcggcgaacgaccggttctcgtacagctcgccggcggccttgatcagcagctcctctgccaaggcgtcctccatgtccacctgctcgcatacggactccttgatccacccctcggccgacttgatgcagcgctcgatgcggcgggacaccatctcgtcgcccgccgcatcgtcgcaatcgtcgatcgtgaggtagtcgagcacgtcttgtttcgtaaccatcgcggctgccccctctcgtctcctattcgggttcgacctccacggtcaccgcgtaggtcttcgattcgccgttctcggcgatcaccttgtagttcttcgggctcgagaagtcgtttgcggtctcgccgctcgtctggttcctgttcgccacctgcactttcgctccggtgtgctcgaaggttgcgacgagcgcggacgtgtcggtgccggccgggacgctgacggcgaccgtgagtccgtcctggtcgatgacgccgaccgagccgccgatggagaacgccgtcatgtcgcagtcgcccaaaggctccggcgggagtccggacgctactcccccgccggcgccgggaaagggatgaagcccttcacgtacgcctggtcgtccttgagctcgacgtcctcgcgctcgatgccccggtagacggtcaagtcctcctcgtaggcgttcatgtcgccgacgacggccacgtcggacgccttgatggagagcgccttgcggtcgtagtacttggcggcctccttgaggtcgccgatgtacaccgggatgcctttcgcgtcgtcggtcggcaggccgacgttcggaacgacgcggacgggcacggtggtggcaccggcggagaggcgcagctgcagcggatcctgcgggttgcccttcaggatgtagttgccgtcgttgtccttgagcgtgtcgagccactggagcccgtcgtcgttcgtgacgatggtcgaggtgggcttgaaggactggccgagggtgacgttcagcacccgcttgatgtcgtccaggccgttgatctcgaccgtcttcggagcgccctcgccctcgtacttggagtcgagggtcgccaggacgaggttgttggccgtgacgcgcgagttgtcggcgaaccactccatgatcacggcgaccaggttctcgtcgctgtcgtcgagcacctcgttcgtgatggtcatgtacccggcgtacttctggatgttccatttcaggcgcccgaactccggggtgccgaccgccgggatcttgccgccctcgccgacgggggagaagcccgacacgttggagcgcttctggaacgtctcctggcctgacaacgtcttcttcacggcgtagtccacgaggtcgagcagcgacggcttgtcctggcgcagcttgatgatcctcgtcacaatgtcctcggggacggtgtagccgccctgggagggcgttccctcgttgagtcccttgaagccctcgcgcgccgcgttggcgaaggacttcacggcggcctcgtagccgcccttgcccgccttcgactttgcctcgtcggccgcgtcgtcggggatggaggccttctccgcctcgaaaagggccttctccacctcgtactcctcctggagcgccttcatctcggcgaccgccgctttggccttcgcgatgtcctttgcctcgccgtcggcgctgcagccctttgcctcgtctcgcttggccttgatccggtcgagcaggtcacgcatcttcttgttcataagtgttctcctcctcaaagagaaaagagcccgtgaggctcagttcgatttcgatttcttcggtttcaccggcttcgccgccgtattcacggccctgtatcgcttgcttctcctcctccttcgggtcaggttcgggaggctctgcgccgccgaacagcttcaccaccccggcctcgcgctgcgcggggacggagacgaacgacatctcgtaggcgtcctcgatgcgcgacatcgtgaaatggcatttccggccgtcgtactcgcggccggggacgtgcttgcaccacgcttccgcgttgtcggtgccgcagaccgagcagatgtaggagccgagccggaacccgacgctcacctccttcttgatgccgcccttgatgtcggcgatgagggatgcgttcgcgtcgttcacgagcacgtagcatttcgccacgagctgcatgtacggctcgcccgtgtcggacaggccgcccggctgctcgaccgagcacgcgtagatgcggccgatctggttgtccgccttgtggttgtggtccttgatgatcgtcttcccgacgaacaggccggccatctgcttcaaggccggctcgtcgaacgcctcgttgtcgcggtcgacgttgttgtcgcacatcgcgatcttgaacgtgaaaacgtcctcgtccgacagctcctcgagcgtgaacccgttgatcgcgtctatgtccgaccggcatatctccgatttctcgatccgagcgcccttgaaggcgcggccatcgcttggcctctcgtcattcatcgtcgccgtctcctccttgttcggttttccctttcgcgtattgggcgcccgccatctcggcggggatgctgttgccgttgaggtagatcctgtcgccgccgggcttcgcgggcaggtcgagcttcgccctcgcctcgttcggcatgtagatgccgttcttcacgccttcagacagcgactcgatctgcgtcttgaggtctgcgcgcaggatggagttgacgttgaacttgaactcctcgccgcccgcgaccctcttctccggcagcagcttgtaggcgatctcctgctcgtagtgctgaaggttgaacagcagcgtgtcgacgtagaaagcgagctgctgcgcctcctccgacgcgtagctcgtcttcgtgtagtcgccgatgtggtggggcttcacgcccatcgcggacgcgatctgcagcgcggagtagcgcctgatctcgatgaactgcgagtcggccagcttcatgttgagcggcgtgaccgtcgtgccgaacggaacggggatgatgttctcgatcccgtcgcgcttgaactcgttgcgggtgaacttctgtatgcccttcgcgaacttcttctcgttctccggcgacaagtcggacgtgtagttgatcacgagcttcgaggtcatcccgttctcgtacaggccgttcacgagccgctggctcttgacgtttccgtcgacggtgctcctcagctggtcgaggacggacacccctttgatgccgtcgaacgagaacgacgagcggaagtgaagcacctcctcggacgagagccagtgctcctcgccgccgccggagtacaggtagtagacgtcggggacgtccttcaccatgcgggcgtcgtcgtaccacacctcgaccgactccgaggggagcggccagaggctcatggagtctcccgccccgtcgatgagggcgtaggagttgccccagtggttgcggttcagctccatcgtcgcccagaacgcggaggccgtcatgtagcggttcggccggaactcgacgaggtagttgagcctgtcgtgccgcatcgtctcgatcccgccgtcagacgcccgccgcatcagcttgcacggcagcttcccgatggactcggagagaaccttgaggcagatgaagtaggtcgattcggaaagggcctcgggcgtgtccgagcgaagcccgtagaactcggcgaggtcactccattcggcgagcgtggatccgcccttcgcccctgcctcttcggccgacttggagcgctgtatcccgaacgcccttctgatgatgtccatgcttcttcccatgtttcacctcctttcgaagtcaccagcccatctcggccaggtagtcggtcatagcctgctcggcgtcgacgtctgcctcgtctgcgagcttcatgcgcgcgtagtgcgcgtctatgcacgcgtcaaccggatcgatgcgcttggtggggccgtagtttttatcgaccttgcactcgccgaacgagttgtagacgagctttgcgttcgcgaaagaccagctcataagctcgttcgacctgtcatagcggtacttcgcccctttgacgaggagcttgacgtccatcgtcgcgtcgttgaggttcttcgccgactgccgcacttcgaggagcgggcagcccagctcttcgagatccgacaggaagccgtcggcgttgtggttgtcgtatccgaccgcctcgaaggacaggccgtactcgtcgcgaagctccttgaggtgcctcgcgatgaacttgtagtcgttcttgtagtcgccttcgccgccggtgacggtgacgaggccctgctgctcccacatgtcgtagggggcggtgtccgtcttgacgtgctccatcagccgcccgcgaggcatgaacgagtgggagtaggcgtacgtctctcccgattcctcgatctcgaactccagcgcgacggtcgtgaggtcgccgccgctcgacaggtcgaggccgacccagcaccgctctcccctgaaatcgtcgagcgtcaaaccgcaagcgcagtccttccaccgctccctctcgatgaactgcctgtcgacgtcctcgcaccagacgttcatgcatttcgtgaggaagtccctcagctcctcgccgcccatgtcgcgcgcggtctgggcgtcggcggctatcgccttggcgcgctcctcgtcggccatggagtaggggttggccttgacccacaccgacgggtcgaacgggtcgtcgttcgcgtcgatgcagtagatgtcgacgaagaagtcctcggcatgcacggctccggtgaggatgttgaccgcgtagtcgtccatctccttggcgaagctgttgaggttgaagccgcgcgtcgtgatcatggagataagcgtctcggccagcgccctcgttccgttccagagcgccttgtatatcttgttgtcccggtgctggtggatctcgtcgaccgagcagaagatcgcgcggaagccgtcgtcgaggccgccctcgcgcgaaagggcctctatcgtgcatcccgtgttcttcgcgacgatgagcgacttgtagtccttgacctcgaaccactcggcgaggtcggcgtcggcggtgatgaagttctgcatggcctcccatgcgaggcgggcctgccgcttcttggtcgcgaccgtgaagagcttgccgtgccggtatcctccgaacccgccgatgtaggttcccaggatgccgttctcgaacgtcttgccctgctggcggccttgcgacttgtacctgcgcctgaacctcctgaacccgtcgcggcgctcccatccgaacgtgcatccgatgtcgaacgcctggcagtcgagcagccgaacggccctctcctcgtacccctcgatgacggtgagggattcggcgaagcctatgacgtcattggaagcctcgacgttccagatataggggaaatcgtcggtgtcctgcctcttgaggtcttcgaggtgacgcttgcaagcgagcctgtgaagctctccgcacacgaccttgccggccgcgacacgcttcgcgtaccgggtcacgcgatccgtcatcgccctttcgccgtccctttgtcgaacttggcgaaccggttggccttcggcgcctcctctaccttcgggatcacgatcctgcacctgctcgtgatggtcaatccgagggccgaggcgcatgtgtggcattggttgaagtaggtgttctgcgccctcgtgagcttcgccagcttgtcgacgtcctgccctcgcttcttcttcatctccttcgacacgagcgacgtcatctcgacgtagctgctcttggcgacgaggtagcgggcgaggacgtcttcgtcgagttcggtgaacaggcgctcgtcgacgtgggcgagcttcgcggcgatctcgtagaactcttcggccgagccgccatcgagccacgaaggcgcgtggacttcggttaggtcgactttgagctcctgctcgtagcgcctcttgagctcgtccttgccgatgttcgagcttcccttggcctcgatcaacgcggcaggctcgcgattcctgcccacgcgaccacctcctagatttttcggataaacgggggtttttgcgcggaaggctcccctgcaccgttgccctgggcggcggctgaaacttttcccgcgcccccaggggctctgatgccggccggagccctcctcgcgccgtctggcgggcgggtcgctcgccgaggcggctccggtgcgatccgcgccgggccgggccatgcggcggctctcgacctgccgtcagaagcggccgtgccgcttgttgtggcagcggacgcacagcgcctccaggttgtcccagtcgtaccgcctgccccagccctcgtcggtctggatgggcacgatatggtgcacctcggtcgctatcgccctgcatccctcgccctcgcacctgtgcttctcgtgcgacagcttgcgggcgctcatcgtccgccatgccttgcacttgtagaagttgacgtacttgcgctcccgcctggcgttgtacgccctcgccgaggcggcgcgctgcctccactccctgggcgggcaatgcgggcactccctgccgtaggggacgaccctgccgcaccgctggcacaccttgacgatcacgggtccacgcgcttcaagtggcggctcatggcgtgcatgccgcacgcgagctccgtccactcgccgtcgtcggacaccgcgtcgagctcgtcgccgcacttggcgaccgccagcacctcggacgagaggctgggaccctctcgcaggttgacgaggtgggccgtcaccctcgccttgtaaggccgtcgctcctctgcggcggagcctcggcgatccttcttcgcagccgcgcctttcgtggccatgtctcgcacctcctgtcgatgatcctcgctcgctaccgccgcccgtccatcggcgagccgtggttggcgaagcactcggcgatgccgtcgcactcgtcgacgagcgcgatggagcccgtgcggaaccgtcgcggcacgggcactccgcacgcgcgcagcatggcgcggctcagcgccgtgtcgcagcgcagggccgcgcggatcatgtagcctatgggcaccatggagcctcctccgtcatctctccgcttccaagcgattcgacgatcgcccgctccctgtcggacagctcccatatgcgcgcggacgcttgctcggctgcggcgcgctctgctgcggcatggcgcgccgccgcctcgtccgacagcagcagcccttttccgtacacggacttcccggcttcgcgctgggcgtccagggcgcttacgagcacgcagtctcccggcttgacctccaggcgcacgccgtacttggcgtacttcccgagcatggccgccgtcagcacgtggctcggatacgagtacttcgggagccgctgcctctccttcgaccgcctctcgtcctggacgcgcttcacggcgcggaataggtccggcgctgtctccgccacgttgtcgccgaacgacgtgacgaacgaggtgtgcacgactgcgccgttgtggtactcgatgtcgcaatcggcgaacacgtggttcgtgcgcatgcacgtcttcgcgccgctgagcgccgtcaaggccggggcgaacaggaagaagctgatcccgcggtttaggtagaactcgcatatcttggacaggatcgagaacggcgggttgtcgggcggggtgtagcagtcgtcggttgtcttcttcggcttgaacttctccacgaacccgtcgtagtcctcgaacaggtgcttctgctggctcgtcgatgccatggaattcctcccgctcccggaaacgaaaaaagccgccccattcgggacggctctacctggatagcactatagcgcagtttttactgcaatttactgcacgcttttacgctggcggtgctcgcgcgggatgacgcgccacagcctgcacagcgcctgctcgtgcagcgaatacatcttgcgctcgctcatgttgcgcccgcccgcgttgagcagcttgaggatcgcggggaacctgaggccctcgaagtagcgcaggtagaccacctccaccatgtccccgtcgtccaggcagtcgagcgtgcgccgcgccgcctcccgctcctccacgtagccgatcagctcggtgtcgagagcgtcgcagaagtcgtagagcttgacgaagccgcgctccatagcgtcgccctccatggtgcggctcacctgctcgccgccctcgacgccgttgagggcgaggcgcgattgctggcgctctatctcggcctcgatgcagcggatgcgccgctcgcttgcgaggacgcccttgaaatagcgcatggcctccttgtacttcggcgaatcgggaaggctcctaggcattcgctccctccatatccatgacggcggcgcgcacgtccggcgacagcttggccatcagctcggcttggacgctcggtcgaagcggcgagccgtcgtcgccgccggcccagtagggagagcgcttgtactcctcggtgaggttcccagccgcgtcgatcgcgcccatggcggtcaggaacagctcggagaaccgccggtagccctccccgccctcgtccatgtggtcgatcacgttgcacatgtaggccttgaactcgcccttgcccatcgtcacagccataagccctccgtccgtagtttttcgcggtggtgccatcctactacattaatcgcttttattatcatgctttgaactggctatacgaaaaaggcaccgccgaagcggtgccgattccgtcacgcctttcgaccatcgtccggccgcgcgcgctccatgtccgcccttatcagctgcttgatgtagccggccatgttctccttgccctccaagtgctccagcagatcggcatccggcggcccgaacctcacgacgacctggcggaccttctcctttcgatacttggcgtctgctctttttttcgcgtcgctcaccatggtatactccaatccaacggccatgggacacattcccaagtcgggagcctcgccttgcggttcggctccctccgatcagtctacctgcggttcaccaatcggcacttgatggatacggtgagggccaatcgccatatccggaatgtgatgctcatggtcgttctcctttctctcgcttggaggccctatcgcctcctgacatttatcattatacatggtataccatgtaattgcaataggcgaaggagagatttccctggcgagacgcaaaaagccgccccgtgaggagcggctcgtatcagagaacctcccatgcaagccacgccgcgaacatccagcaggcgtaggcagtcgcgccgaacaggccgacggcgagcgcaagcgcagcgacgcacccgcagcacccggacggctcgcgcgtcgagtagtgcgcgctcaccggaacaccgccagcccgcaacgctcgcacttgtgctgaagctcgtgcaagcccccgctgcggaaccagcccatgggcacgagctctcctccgcacagcgggcactcgtgctttctcatgctcccagcatcgggatcgacgaggaggggcagccctgctccgaccgcgctcacgtaacgctctttgacgatgctcgcgctcgatcccgcgacgttggcgaccttgaatctatagctcatcgaatcacccccaacctccgaagacgcgacgcgtagcatttgctctcgtcacctgcgtccggcatctcgtcgggatggcgggagtcccactccaggatctcgtccaacatgtcgagcgccaccagctcaacgctgtctcctcgcttgcggtaatacgccggcgaggagcattcgtcgctccgggccgtcacgacgtagttgtcgcggtcgtcgcagtctccgctgacgccctgcatgctgcacacgccgtcgtcgaggaacacacgaacccattcggcgcacgtcccgcacgtcttcggctcccacgacatgcccccgaactcaggcggcacgctgcactcgtcgccgtccccaaccgcccacgtggtcacgtcgcagtagtaactggccttgcgggcgcacgtcccgcacgtcatctccgcgacgcggacgttttgcccgtcgtcgctcaataccgtcagctccattcagcgctcctctccactcttatcgtcccgccttcgacgctcaccgccacgccggcctcgtccgacagccactcgtgcaggtcggccagcgtgacgtagccgcgctcgaagctgtcgtacaagtccaggatcaggtcgcccatggcctccacgcgccctgagtcgtcgaggccgtcgaagcggtcgaacttgtcgtgcacgaccatcatcggcagggcgagcatcagcgcgaaagcccgggctatggccgcgtccgccgcctccttcttgagcccgtcgatctgcgactgcgtgaggttgtagaccggctcgcggcccttgatcccggctgctcgcctagcggccctgctcacggagatcaccgccctttggcgcgtagtgctcgcacttgccgcacaggtagtagttgctcacgccccgtccacctcctcgatcacggcgcggcacggaaagccgacgcgctcgcaatcctcgtcgaccgatccctgccgccacgcgcatttgctctgatagacgtacttgttgcatacgcattgcaggctcagcgccttggccctatacctgtcccgctcggcctccgctcggagcatcgcgcgccggtcgcgcgccgacgacatcctggcccgctcgtacagtctctgcttggattcggcggcgcgcctccactcgtcccgctcggcctccgccttgcgcagcatgtcgcagctgcaccaagcggctggcactctgtcggcgcagtgggtcacgtcggcgtgcccgcacgcctgctcgtgggcgcatcccgggcgtacgctcgctatcggcatggctccccccccttctctcgccccaggcgcagtagccgtatggctctgtctcgacgtatttatctcctctgaggatcggcctgttaatgcagtagaccagatcctcctctgaatgctcgtagtaatgcttgcagtcccggcaccgcacgagcggcctattcaggtagtcgcgcaccgtgtacacctcgcgccccgccttgccggcctcgtacgccttgcggatgacggccacgatctcctcgtcggttatcacgtactctgccatcagaccaccgccgtttcgtccagccaatcggagaaggaatcgcaataagccgaagacatcccgaacgccgctccccatccatcgatagggcagccactgcaggaaatcgagcgatcgaaaaggcacgagtcagccgcatcgaccacctcgtcgcgcgtccccaagtctgcgaagtaccgctcgtagttggtgcgctcgggggacgcttcgaggtcgacggccgcgcggccagggcttaccataaagcggccgtgagacacgccgatgatcaatttaccgccggcgatcaagtcgacctcgccgagcgcgagcagccggtcgcctacgtacacgatgcgccccaggctgtcgcggggcatgggcctaaccccaatcggcctctccaaggtgcacctcctccccgcagtccgggcattcgacgcagcccgcccagccgctccatatgctccccgtcccgtcgtccgcctcgccgaacgggacgctcacgcggtactcgcaatgagggcactcgaacgatatgctcacgggcttctcgtcgatatggtacgcgacggcctcctcgtcgcgcttctgcctggccgcgaaccattcggcgatgctctcattcatgtccggcctcctcatcatgaccgtacgggcacggccactcctcgcaccaggcgcacgggtggcattcggcgcacggccagcagtcgccgcagcgcacgagctccttgtcgtggtggcagtagatctgcagctcgccgttatggcactgcgggttctcgtggttagccattgtcggcctcgcttccgccgttccgcacgcggcgcggcccgatccagcatccgatcctgatcttcagcgccgggcgcttccgatcgtcccacgaggggggcttccgcccccatgccccgcgggctttcgcgtcgaagcctccgcgggacttctcccagttggtcatcatacgccccattcctttagctgctcgtcgagcggattccacgtatcgttctcgccgtcgtgccattcttcgcgcccgcagtacgggcacgagaaagaaggttgcttcatgcggtctgaaagacgcatgttgcgcgtcagaaggaactcatggccgcactgggtgctgacggcccacttgccctttgcgacccagcacatgcgccagaagcacgtctctcgaccgctcatcgctccaccaccttcgcgccgcacaccttcgcaaaccaaagcggtgcttccccctcgtccctaagccttctggcgaggtgcgcggcccgcttgcactccttcgagcagtatttctgctcggggttcgtcggcttgaagctatgtccgcattgctcgcacttgcacgtgcgctcccagcgggcgttccaggcttcggcagccttctcttctgtcgagtaaacgcccgtcccttcgacgaagcagctgggattcgggcagcacgcccagaaccgatccggtgcgcactccgacccctcgtcgaccatgttggcctcgctcccgcagaacgggcacggctcaagctcggccatcgtgatcaccgctttcgatctcgctcgccaccagctctttgatgcgctcccgcttctccgcgacctcgcggttcacgcgctcgttgaccgctttctttatgacatcgttgatcatgcggtcggacatgctctccttgagcttggagcggtagtaatcggcgaacgtgtcgaaacgctcgcgatgcccccacccgtcgtcgatgtccaccttctgcgacagcaggtcgtcggctacttccgacgctatggcgtcagcccgctcttcgatcttccgctcgatcttcttgcgtatctcgtagtcgacggcctcgcgcacgaggcgttcgatggcggcttcgctcaccgcttcctcgaccttctgcgagatgatctcctcgaccatttcctcggtgatcttaaattccatggttccctccgtcatcgtagtaccccctgtcgtcgttcttgcgtatcaccagcatcttggccgcgtcgagatggcgcggctcgaactccctgagcgccgtctcgcatgcttggatcacgtccatcagctccatgacgtagggcagcatgccgttccagcagatctcgtcgaacgcggtacgcgcctcgttcgcctcgcggaggatcgactgaacctgctcgtcgcgatcgcgattgttgctcggcacccactgccggcacggcgggaactgccattgccacggtgtcggaggcatcatgacgcatcgcctcccgtctcgtccccttcgtcgagcccgttcttcttcgcaagctcgatcagaatccgcctggtcttctgcgcgttttcgtacttgatcctgctcgtcttgacgtctcgcctcgccgcgtagatgagcagcgccgaccatacgagcatcatgcagagcaggatcacgcctagcacgccgtccgcgatcatcgctcgcctcccgtcgtcttggcgtccagctcgcgctggcggcgcgctatgtccatgccctgcgcgacctcgcacgagacgacgccgtaccgctcatcggggtgctttccgtccacgacggcggggcaatcgaggcagttgacggcggtgcggcatccccagtagacatcgaacatcttgcccttgtcatcgtcgatgagcgcctgggtgtcgggcggggtgtgggtgagccacgatgcggggcaccatgctgctaccgactccttaacacgcgtcgtgccgctttccccgactcgcgaaaccgtgagggcttcgccatcgacaacgcccgccaaaccgcacttgccgtaatactccgaaccgatttttcccaccatgtctgcatgggcgtcatcgaggtacaccgtctcgcccgccttgatgggcaagccgtctgctcccagccactcgacatccgcgtcctgtttgccgccatgctcgatcagctcagcgatgcgctcgcctaacgcgtcgagcgtgccggtgtaggttcggagccgactaacgccgaccgctgcgcaaagctcgtttacgatgtcgaagtcggggttcgccgatttcagcacttcgtcgtgcgaaaccgcacgcagccgctccacggcaacgcgcgcctcgccggtcagtccgcgcttagcagccgccagctcatcgacgtgctcgcgctcgatctggtcggcgatggagcgcatcgctccggagagctttgggcggccgacattcgcaccccattccgcttcgttcccatctttcaaaatcgcccataagctcacgctgccgtatacgtcttccgcgagcttccgcagcatcccgatgccgctcgtatccttatcggccatttcggcctccttatccgtcgttataggccttatccaggccttatccgtccaaaagccgggttaccatggccgctgcctccagcactccgcgtcggctccgcgccggggctcgtccgggtcgaccggcgacaggccgtcgtcggcgcacaggccgatgtcgcggacgagcgcccacggggcctcgctcgccagcacgacctcgcaggccgcgcacgtccggcacgtcaggtggtcgaccccctctcgcagcccccggaggacggggttcgccatccgggggcgaagccgcgagatcgtttctgagggtgagtcgcctccgttccgcgttcccagtccgttccgctcgcgatctgccgcgagaggcgcgccagaatcgctcacagcgcctcccatccgtccatcgccagggcgtcctggtacttcgccggctcgtcgagcagcaggaactcccagtgcccgccggtcgtgacgtagcccgacgatctgtcggcgcataccgcctcgacccagcggaagtggagcttgccgtcatgcgcctctccgtggcacccgctggcgttgcccatgccgcagagcctcaccgtgggcttggcgacctcgcgcccgttcacgacgagcttcccggcgccgcgcttgacgatgtggtgcttgttcgtggcgggctttccgcagacgcagcagacacgggcctcgttgtcgatgctcggcttgcccatcatcggcagcaggatcgcgtccaccgtgcagacgtccttcgacggcttgcgcggcttgcggcgcgccggaggcttgggatagctcgcctttagctcgcgcttcgccctcgcctcggcggccttctcggcggccttggccctgccgtcatcgcgccgtttggcgttgaggcgctcgcgctccgcgcagcacaggcggcacttgcacccgagctccacgcctctgcgcgtcccgtggcgcttgtctcccgggtcggccatgaggtcggcgaggtgctgggcgttggtcttcatcgccacaccaccgcatcccggtcgaacgcgtcgaggcagttcgggcattcgtacctgccggactggttgttcttccacatcctgactccgcacatcgggcacgtcggggttccccggtcggaaggagaagttatttttcccgaagggaaaataacttcttccttacttctttccttacttggaggcacgtcgtgggcaagcgccgggtcagtgctggggtagcccccgcactcccccagcactaccccagcgctttctccacatgatccttcgctttctccacatccggcagccgtggggcatcccgccgccatgaccagctccgcgtcctggaaccggcgcgtgcggggctgcttcgagaggctttccggaggctccggaaccgtggtcttggacgggttcttgaccgtctggtacaccttgaagttcacggtgctcacgtactcctcgccgtcgacctcgtacgccttgatgcagccgacccgctcgagctcggcgagcagcgagacgaaatcggcgtcgggcatgtcgtcgaaggggaatatctgcttcttgagcttcctcaccgagaacttgacgttgccgttgtcgtcgcccatgacccacagcccgatgaaggcgagcctggccgacctgctgcactcggccaggctcccgctgtcgaagaagtccggtttgaccatcctctggcgcggcatgcgatcacctcagctcgtagctcggggactcgcagcacgccattccggcgtcgaggtcctgcgcggtcgcatcggcggccacctcgctcacgacgttgccgcagttggcgcagaccgcctcggtcgctaatcctgccaggcccttttcctcctcggccccgtccggggccgccgatgcctcgtccgccgtctcgtagacggcctctatccgcggctgctcgacgtcgccttccggcatgtcctcttcgccaacgcccatctccacggcgtcgtagaggccgccgaactcgtcggggaacgcctctcgcagggcgtgcacgatggccgtctttcgtatcatcgtcgccggcttggacgtccagttgctcttcccggtcgagtactcgcgcatggacacctcgtcgaacatggggttctcgtatccgtcgacgtacacgcggcaccatccgccgacgagcgtctcgccttccactaccatggatccgtcgcgcctggtgagcttggtcttgtcgctgctgaggaccgacacgcccgcctcgaaccccttgaacctggggttcttctgcgcgcgcttggtgaaaacctccttgcccaccaccatggtggccggactgctgccgtacttgatcaggtaagcctcgcgcgtgaacgggttcaggcggtgcgccttgcacagcatcatgaagttcgtcacctcgcgatcggacaccttgtccttgtcgccgttgacgagaagctccctgaccctgccgggcgtgaggttcatgtcgtcgccgttgtcaagcttgtaggcgatcagcgcgttactcgccatggtcggaacctcccagcaggagggcgtccacgccgccgggaaggccgcgcaggatgggcaccacgtcgtcgggcttgcacccgcgcaccatcgtccccttcgcgagcttcgggcggtactcgacccccggcacgaccatgccggagtccatgtagcacacggcgtccccgacgcggctcatggacttctcccagtcagccgagacgaccacggtttcccgcaccgcctcttcgagcacctcggcgtcgaacacggattcgagcgccttgatgcagctgtccatcatgtccggcctgatcgacctcttcacggaggccagcccgtagtcgacggcgaactcctcgaacgccttcctgtccgacacctcgtacccgtcggacgcgaaggtgacgacgagctcgccgaccttctcgccgcagaccttgagcgccttcttctcgactccgtcctcctcgtacgcatcgcgcatggcctcgtcggcgtccgagcgcacctccttgagtcgctcgtccaccgccttcttcaacgcggtgagcaccgcgagctgctcgttgacgttcatgcttcctccagttccacgattacgcgcgggttagccttgttgacgaggtagtcgtccgacaggctccccacgcacgcccagttgtcgttgtctattacccccgcctcgacgagggcatcgagtatgaatttggccgcgaagcggatgttgtccttgtcgcggcgcatgtccggctcgatccaggtgaacctgacgtttaccggcccgcgcatgggggcgagccccgcctgcctgatgcaccggagaacgacgtcctggttctcgcgcttgaccttcgccccggcgcgggcgttcgcgcggcacatgccgacgtagtcgttgcacccggcgaggcggccgggcacttcgaactcctgcctcacagcgccacctccgtgtacatgtccaccttcgagcggcccatgcggaagcacgggcggtagatctcgcgctcggccggcttgagccgctcgaggaagatgcgggcgaaagccggggtgtaggcgttcttcacctcgacgcggaaccggtggcgcatcatgtgggtcaccgcgtcggagctgatgtaccccgtctcgtcgccgtccctccgggccgtggcgcaccagaactgccactcgtcgtagtgggcggcgacccagcgcctggcctcgtccatgagcgcctcgccctcgctccccatgccggggagcgccatctggttcgacggcggctcggcgggcctcatgcgaccgcctcccacagcgcgtacagcacgagaagcagcgcgaacgggacccacagcatgcgcatcccccgctcgaactcgtcctgtggtatactcctgtcgtcttcatagacggatgcgcgcccgcttttccaggactggcgcgctttccttttatccggcattctccataccttccttccaccaatcctcgaaccattcgggcttcacgagcctgccgcgggtgcgccccggcggcaggaacgtctgcaagcgcccggctaccgcgtcctcgtagagcgtcgtgtacgacgttcccgacgcgcgggcgacttcccgcagcgtgtacgctcccttcgcgggaagccccgcgatgcgcgccatgcgcagaagctcgggcgtgccttcgctttccatgccgtcctccttcccatcgccgttttacgttatcccgctttgatcagcgggcagtgctcccgcctcgatgtgcgggggcgcgtgcgggacataccgccgcgtcgatggggttttcaaggtgcgaccggatacctgcacgagcggctgctctgctagaatcggcttctcaaccgataggagggtggatgctctaccatttggacaggacaggatcgctgctcgaaggcgcgaggctcgagctcgtctcgtccgcgtcggacgatcttctttgcgcagaaggggccggcgcggctgtcgccaggatgtttccgcgcgggatatccagacacgggctgcgctacctttcgaccgttcggtcgcgcgtttccgacatcccgctcttcaacttgggatctcttgagggaaagccgtcttctgccatcatcgagcagacgttcgagctggtcaggagagccgactttcccggcatgccgtcgaggttccagtcggtgttctgcgtcgaagatccgtccgagctcgacgcatggccggagatcacggcttccggcggcgcgctgttcgagatcgcgccggcggatcccgccaggatcgcgaagctcgacgcgtccctcctcaaaggaggcttcgcggaagtcatcgagcccggtgccgtcgaagcgtgcttctcgttcccattgtgcgccgcctttgcataccgctactggtccggcgagatgtcggaatcaccgaagcccgaagtgctcgtcgagcttccggcgacggccgcgctgaaggtgcgcgcgataccgcccacgcccgtcccggcctccgagaccttgcagccgcatcgatggcagtagcggctcggaaccaaggctccggaccagtcgctgccgtcgctgaccagccgctcgccgcaggaggagcattcgaggtgcgccgtgaacaccactccggcttgcgtctcgtgcctgtcgagcttctcgacggcgtggcatacgcttcgttcttctctcattcgcggctcctttccgagaagccgctcgtgcaggtattcggttctcaaagtgccggtggcctccccgggagtcgaacccggctctgcggcttataaggccgccgccctgaccgttgtgctaggaggccgttacaagatagtgatgtttaacttcactatctagagcaaaaaaataccgcggaggaagtccttgatcagtccttttccgctttcgttgaacttgttgtacagatcctcaagctcatcgacggtgaaagacttcggaagcttctccctcgcggtataagtcggtgtcgacacgcagatgatttccgctgcctgctcttgcgtgaaaccgcttgcgacgcgagccgcgcgaacgatcttattgttttccggcatacctacctcctctctaaagagaagtataagtacactttcgctatttgtaaatagcgaattaaaacatttcttttcgattttcgaaatggagcgtattatttcacaaagagaacttttgattctactcgacgaggagcgcgaaagtgaacgcgggagacaacatcaaaaagcttcgcgagattcacgatcttacccaagagcaattggctgacaagctcggggttacacgcgagtcagtcgtgaagtgggaaagcggaaaaatcaacatcagggatcgccatgtaagcaagcttgttgagatctacggaatcgacccagatgacatcaagtcagaaaattacggactcgcagcgaagagtcttgcggaaacgccgaacttcccggtaggggcgatattccccgcgaccccccgcaaagcctacgcccccctcctcggccgcgtccacgccggggacgcgcaggctcccgagatcatcgaggacaacgtttcgctgccctacgaggtgtgggacgggcaccgggacggatacttcctgcaggtcgagggcaggtgcatgagcaaggtgtaccccgagggctgctacatcttcgttgatccccggaagcagccgcagaacggctccatcgcagtggtcagcatcgacggcgaggactacgtgatgcgaagactgtacagaggggcgaacacgatgatactgtcgccagacagctgggacgacggttacgaggacattgtcataagcggccacgacgagagaaccgtcgagttcgtcggcgttgtggtttggtttcaagcaagcaaggagatggagtaacgtatggaagatgcaaaaaagatcatcgacaagcacctcgaatcagatcttaaagaagtgtttgaaaagcacgggtggagcgacgatgaagctgcgagttttgcgagaaagtcagtcaagattgccaatggagcggagatcgcgcaaaaggttcccgttattggatttgccgactgcacccgatagatgaaaggagcagctatgccaatcgtgcaatgcccgctctgcggcgaaccggtttcagacgctgcgtacagatgtccccactgcctagaggtaatcgaaggtgtcaccgcaggtgaaagaccgagggagcaacatcttttcatgacatcgaccgacacggtcgaaggacgtcctattgtttgctaccacggctacataacggcagaagcggcaatcggcctgggaatacttaaaacattcgccgccggattatcagacatagcgggaacggagtcgaagagcctaggtggaaaatttgccgaagcgaaggaagcagcgctcaacaagctgcagcacgatgctcgaaaacttggagccaacgccctggttggaatgagaatggacataggaagcgtgggcgacttcgccgttgtcatggcgaagggaacagcggttacgattgccgataacggatcaacagagtagacaataaagccccgcgcatcgaagggcggcgcaatggctatataggatggaggtggaatggctaattgttttcggtaaacctagataatccaaatgccgagaccatagcacttgtggttattgctgccgtgatttgcctggtcgcctcttcagcgacagggagctttgggtggaggtcgaaactaaagagagacatagatttgtacgagcgattggaaagcattgccgaagatagctttgatcgagatgctttatatgacctgaggtcaaagatcttcaccgacctggcaatgaagatgtactttcagaaagagacgaagccgcgattgattttgtctactttcggagacccgctgttcgatgcactgctcctgtggattgccgctcattgcgttctgtgggcactcggagattatacgttcttaggctcgatggtcatactcattgcgcttatggtaatagcgtcgatcgtcaaaatcgctttgagaaacaaagcgagggaagatacgctaagagaacgggaacacaacccacccgaagagcgcattggacaccaaggcgagcgtgaggtaaacgcaggggaataggaagaagaagcgcatggctgatttcatcgtccatccttcggtatctatttttcgaatagctggattatagcacgatcagaatgcaaaagcccctcgcatgcaggcaggtaaaacattttataaatacttgctattttatattgccatataattagcaatactttataatatactcatcggttgagggaaaggaaatccgatgccgaaggagcaggaagtcagagaagtgacgaagcggcttaggaaggagggatgggaggaggagagcggcaagggcagccacgtggtgttccgcaaggacggcaggacggtgagcgtcccgacgtcgaagaaggagctgaggctgggaacctaccgcaacatcgcgaaagcggcggggtggctctgagccccgccctccccttcctccgagaaaggacagacatgggcaagttcatctaccaggcgatcatgacccgcgaggacgacggcgggtacagcgtcgagttccccgacctccccggatgcttcacggaaggcgacgggtacatggaggcggtggagatggcggcggacgcggccaggacctacatggcttccctcatgctgcacggcgaagccgcgcccgaggcgaagcgccacgacgcccccgaaggatgcgagagcgtccacgtgttcttcgagacggacgaatcctacatcgtgcgcggggaggtgatgtccgccgcgcaggcggcgcgcgagctcggcgtgtccgccgggcgcgtgacgcacatgatcgacgcggggctgctcgacggctaccgcagcggcaggcgcaccttcgtgacgagggagtccgtcgacaagaggaaagacgacccgcgcggagcggggcggcctcgcaaggaagcgctgcaaggatagagagaaagccccgcgcgtacgggcggccacccagcgcgaggcttaacaaacaaaagaaaggaggaaggctgtgcgaaacattgaatggggcaacgattacaacgtctattgcgacgagagctgtcacctcgaaaaagacggcaagaaagccatgtcactcggagccgtctggtgtccaaagggaaaagtcccagagataaacaaacgcatccaggagattaaagagaagcacagtatacaaaaaggcgcagaagtgaaatggacgaaggcttcgcctggcaatatgcaattataccttgatatcgttgactactttttcgatgacgacgacgtacattttcgaggcctcgtggttcctgacaaatcaatactcgaccatgggaagttcgcgcagacgcatgacgagtggtattacaagatgtatttcgagatgctcaaaatcattttcagtccaatcgcatcctattacgtctacatcgacatcaaggacacccattcaacggagaacgccaggaaactgagcgacgtctgcgcaaacaatgcttacgatttcaaccacgacattataaaacgagttcaacctataaggtctgaagaagtccagttgatgcagctcgtcgacattctcacgggtgcactcgcatacagacacaaccacgacacctcggaagaaaagctgaatgctacaaaggtcgcaattgtaaaccgtattagcaagcgatctgggtacaccctgatgaagaacacccttttcagggaggaaaagttcaattttctcatctgggaaccttacggcaggtgatcatcttgatatacgaaggatgctggctccccgagttggttccatgccaagactgggggcgttggaaggaatacgaaaacgaactgtacgctatcttcaaatcagatttcatcgacgatagcccatcgtacgaaaacaagccggtacgaatcagaaagcacccgatggaacatgatcgcgaagaggcattctggcatgtgacgtgctgcgatttcgcaaaagacaacgacaggaaaccggacataaaccgatgcgagcgcatacgatggattagatcgttcatcgaaaacagcaactgcaacgatccgttttgcgaagaatgcgacggcatgctcgtatggtcaaccatttaccctaaaaccaaaagccctcgcgtcaagatactgcttgaggaggagcgatacgttgttatagtcgaagtaagaaaggagtattgtcttttgataactgctttttacatagaccaagatcatagattaagaaagctacggggagagtacgacagcatcaggacaaaaacaggaagcgcccccgaagggacgcaaccagatactctttccacgcgcggtagatgagctaatgatagtttactatcaataggaacctaatgtaaatccacatcatattgtggaaacagtgttgaaaacacgacgttactccaggtgaaacaatgggtgaaacacaatatgttgtgtcatatttcatgataggaaataaaccgaatcggtgagcggaaagagcctccgacagcttggcggcaggacggaggctcagagattaccaaccgcataacacggaaggcagggtgattgtaccatgcccaggaagaagcagcgccgcgcgtggggatccatcacgtccgtttccaaggacaagcagatcatccgctggcccgagaacaccccggaagggcgcaagcgcagatcccgcacgctgcgatgcacgcgaagcgaggccgacctagagctggcgcgcctgcgcgtcatgcacgccgacgacaggcccgtccccaccatcggagacgcctaccgcatgtggtacctgccgtggatcgatcggcgggtgcaggacggcaggacgaagcccaacacccgcgaagcttacgccatctgctggcgcaacgtgatcgcccctcgctgggactccgtgcccgtcgacagcgtgcagcccgcgaaagcccaggaatggctcctgacgctctcggtcggcaacgcgaaccacgccgtcgtgatcctgcgcaaggtgctggacttcgccgtgcagtacgagctcgcggagacgaacaagttccgcctcccctacgagatgcccgtgcgcaaggccgccgtgcgccgcaccggcacctacgatctcgcgcacgccgaggcgatgctagagcggttgcgcggcacgatcgtcgaggctccctacatcctgtcgtgcttcggcagcgcccgcacgggcgagtcgctcggagtgaagccggatgaagtggagctcgtcgaatcgcgcgggataaagctcgccgtcgtgcccatcgtgaggcgcatggagaagacgggcgacctccctctgcccgacggcgacctcaagaacccgcagagcgtgaggacgacggtgatacccgagccgtacggcgtgctctaccacgggatagccaggcagcgcatggccgacggcagcgggtggatggcggatcgcggagacggattgcccctcgacatcaactcgctgacgcacgcgtgggagtccgcggcgggcgccgacgccatcccgttcgcaaacctccgcaactcctggcgcaccatcgcgcagtacgtttggcgcatcgattacgacaccatggagttcctcatgggacacatcccgccgggcatatccggcaagcactacctgcgtccgaccgtcgagaacctgattgaagcggtagctcacgcgatggtgcaatcacgggccagttaggatattttgggatatttcaacattaaaccccaggtcagggacgattaatcttaaggaaaacttaagcaatgaagcgtatcgcgccgaccctttagcgaaacggcgggaccgcagccgtaaaagcgccgcatgatattccattcgcctctcacggctgttactatgattgaatcagttcgaaatagggcgagcaaggagacagggatgaaaaagagcgttctcgactcatccatcaactgggaattcaaccaattcgacggaacgctcaggatatcgggaacgggaaagatgccgaggttcacccagaacaaggagtcggggggctttgacgacaatccgtggaatccgataaaaaacgaaatcgccacactgatcgtggatgagggagttgtttccgtttccggagcggcgttttggaaatgcaaaaacctgacaagggccatcatgccgcatgtactgcatatacacgctggagcattttacgaatgcagcgcccttgaggaggtcgcggtcgaagaaatcgtgacggtaggagaaggagccttcgaaaactgctcttctttacgccggatagcgcccgagctatccccttctgctaaacgcaaaatcgagtccttagtctttgttgacgaatgcgcgttttccggttgcgaaagcctcgacagcgtgaccttcagcaatctgaaagcgattggtcgaggggcgttctatcgctgctcttcgctacagtcggtttcctgcgaaagactctcctccattgcagagcatgcgtttagagagtgttcgagcctctcggagtgtcgggtatgcaacggttgtgtaatcgccgagggggcgttctcgaaatccgcgctgtcctcaccgacgaaattcatcgactaggttaacttcgtaaaggacagggaagatgctgtacacctttttcgacgtggagacgccgaacagacgcaacgatcgtatttgctcgataggagccgtcgtcaccgaccaagacggcactgtcgtagaaaagaaatcgtatcttgtaaacccggaatcgagcttcgacgacatcaacgttcgcatacacggtatcgccccggtcgacgtccgcaacgcgaagacattcccggagctctggtacgactctttgtccgcattcttcccggtcgacggcgtggttgcacacaacgcgcggttcgatctcagcgtcttgaccaaaacactggtctcatatgatatcccctcacccaagatgagctacgcatgcactcttgacatgtcgaagaaaatcgactttataggcggagggaagcttccgcacgtatgcgaggctctaggcatcgagctggagagacatcatcaagccgaaagcgatgccacggcatgcatgcgcgtattctggacacttgtcgggatggccggctgcatgccgagcttcatagcatacgagccaggcgctaaaagctgcaagaaaagcggggggcgataccgaagcatctccgacaagaccaaagccatgcaatggcttataccgttgctaagggaagtcgtgtccaacggaaaggtgtcgacgttcgaagccgaggcagtcttggagttcttcgggctgcacgaagaactaacgtccgatccggcgctttcgcccatagtcgctttgcttcaaaacgctatcgctgacggatgggtcgacgaagccgaatcaaacgagctcgccaacctcatctcccacatcgtaaacccctctagcagcattgaagacagcgtggatttcgccaacagaaaatttgttctgaccggctcattcaatcacggaaccaaagacgacgtgtccgcattcattcaagagcgcggcggcgaggtgctgcagaacgtcaccaaaacatgcgattatgtggtcatcggaggatgcggcagcgaggcgtattccctcggcagctacggcggtaaagtcaagaaggcgctcgactggcaagcgaaaggcgtacctatgcaggtcatcgaagaatgcgatctatacggcgaaagataacacccccaccggctagaattccatgaaccggccatctacgcatacggtacccgtttggtctcgagtaccgttgacaacgtaaacgctttacgacatactgagtcgacaacgtaaactcatggaaggaggtctctatggcgatgacggcatcggctattcggttcgagccgaatgagaaggaatggattgcagcgtttgccgagatgaacggttccacgttttccgcgcaagtgcgccagtggacgctcgaacgccttgaggacgaacttgacgctcgggacctttcgcaagctatcgaagaagacgatggcacgcgtatttcctggagcaaggtcaagtccgatctcggtctggcgatttgattgggctattcggtagagttgacgagcggagcggcgaagcagctgcaaagcctcgatcgcaaaacccttctgctggtatcggaactgatcgagcgccttgacggatgcgagaacccctgcatgctccccaacgcgaagaagctccaaggggtgaagaacggttggcgctggcgttccggaacgtatcgtgttctcggcacagtcgacggtagccggataacgatcgaggtattcaagatcggacatcgtcgagacgtataccgcggcttataacagattcatgcccatgcgaaagcagccatcttgtcagatggctgctttcgcatgggtgcttgcatccgagcaatcccaggtcaggggctgtcgaacttcaggaaaacttaagcaatcggttgacgtttcttctgggacgggaggggcgcgcccgagggatacttgacggcgaggacggcgagccgcgagcgctgccggagatcgcccggggcgcagtcccgggcgacgcctcgctatccccgtatccaacgctttcgaggaggctccccgtgccgtacaccaattccttcgatgcaaggcttcgcccgaaccgctccgtttatcgcgctcggcccctacgccgcgcttgcgctcccgaaagccgcacgcacgccgcatccgacgtgcggcgcatcccttcgcgatcgctgccgcagctcgccgtcgttctggcgctgctgatcgccctcggaggtgcctgctggtacgcggtgagcaccttgacgggcctcgtcgacggcgcgcgggccagcggatccctctccacaggcccgcaatcgacgccgaaaagcgcctggaaggccggcgaggtgcccgcgctgtaccagcgcgatcccgcatgggctgacggaacctacgcagaagacgacttcggaaccaccggttgcgggcctacgtgcatggccatggcgtacgtggcgctgaccggccgcaccgacatgacaccggccgacatgggcgcgttctccgagcgcctcggatgcgcgacccccgacggcaccgcctggacgttcatgaccgaaggcgcggccgagcttggcctcgtcgccgaagaagtgcccgcagacgagcagagcgttcgccgcgctctcctgtccggctcccccgtcatttgcagcgtgggaccgggcgatttcaccagcacgggccacttcatcgtgctcgcaggcatcgacgaacagggccgcctgctcgtgcgcgaccccaacagccctgaacgcacgggaaaggcttgggacttcgccaccgtgctcggccaatgccgcgcgatctgggcctacacggccgcttgacgcgcctcgcgcagccctttcaccagctggtcggcgcacgaagttgcgcgccgaccgcacgtgttgccctcaagcgccgcggcgacgtcctccaccgtcatgccctcgatgagcttcgacaccgccttcaaattgccgtcgcagccgccgacgaactcaacacgcgccaccttgtcgccgtcgaggtcgatatcgatcgcgcgcgagcatacgccgcgcggggtgtaacggtacatgcctctctcctcctcttcgcgggtcccgcccgcatctttcagaacaatccgcaagtgaacaggaagttcaacgatttcaagtttgccccgacgtgctcgctcacccattgctggcagaaacgcagcacggaaaacgcggcggaaggatccgcctcgagaatctcgatctcggcgaacgtggagctcagcagagcccggcaccacgcgaccgtagaggcagggacgagcaccgtctccacgctcgaccggcatgcggcgcacaccgccccgccctcctggtacgagagcgccatgagtccgctttcgggaaccgcctccacgtcgcgcccgcaggagacgcacacatcgaggctggggcgcaaccccgcgaacgcaagcgtcttgagcaagtgcgccgcgcacacggccggcacctgcgcgggatcgacccgacccaggctggacagcgccgtgcgcgtgagcgcgaacaaccgcgggttctccagacccatctgcgtgacgcggtcgagcagttcggcaatgggcgcagccccggcagcgtgctcaatgtcgcggcgaagacgctcgttgctctcgacgagccgcgcttccttcacgatgtcgaggctgcgcccgcgcgcgacgagcaagtcgacgaccgagtacagctcgaggcgcgccgcgaacgagctggcgggtttacgcgcgcccttcgctacggcccgtatctgcgagccgtcctcggcgagcagcgccaggatgaggtcgctctcgccgagcttcgtcttgcgcagcacgatggcgcgcgcgtcgtaggtaggctgggacacgcgcgctacgagatactggcgatggcgttgtcgctcgtccaaacgatggcaccgctcttctgcttggaggagccgtacacggtttcgccgtcgagcgaggtcaccgccttgcccgtgatggtgaacgacgtggtctcgcctccctcgtacttcacggcatccaccgactctaccagataggccgtgccgccgaccgtgacggtcgagcccgaatcgcgcaaaccgccgagatacgacagcgccgcctgctccaactcggcgccgcgcgacaaggcgaccgacacggtgaccgtagagccggagtcggccttcgcgtcggtttcgggcgtcgtgccgagcacggtaccggcaggcacgctgtcgtcgtagacgtagctcgccaccggttcgtacccttcgtcggtcagcatcttggaagcctcgtcccacgtcttgcccttcacgtcgggcacggtgaaggggacggcaacggtaacggtgatctcggtgccggcagcggccttcgaccccgcttcgggggctatccccagcacgaggccctcacgctcgttcgacttctcggtcacgaaggaaaccttctcgaacccgtccttctcgagcagagccgccgcttcgtcgcgctgtttgcccgcgacgtcggggatcgtgcgcgcctccgaaacatggatggtgacttcggtgccctcctcctcgcgagagccggcgacgggatccatgagcagcacgacgccctcggtgtcgtcggacttgatcttctcctcgtgcacggcgaagcccttggactccaaaacgtagacggcgtcggactgggtcatgcccacgacgtcgggcagcatcttgccgccccatagctccagatagtacgtgacgcccgcggccgccccgccgacggccagcagacatacgagcacgatggccacgatcttgcccttgccgcccttcctctggttggcatcaggtgcgcggaactccttctgcttgggcgcggcctggccctcgatacgcggcatctccatggtatcgcccggcccccacgacttcttcgggggcacgtagcccgcatcgacgaggcattcgtcgaagcccgagaaatcggagcgaccggagatcggctcttcgtcggggcgacggggcacgaacggcgtgagatcgtcggcagcgcgcgcggcctcgtcgtctccgatggagccgaagtcgaacgcgttgccgttctcgttgacgttcacgcccgccacgtcgatggcggggatgctcgaacgatcgagcggacccgaagcgtcgggttccccggcggactcgggttcgacggcggatgccgtgccctcgaagtcgggatcggactcgccggcctgcgcatcctcggggccgtcgtcagccgcgatcgagcgcagcgtcgcatcgctcgtggacgccgcggcgacggccgccatacggccggtcaggggaaatccgcaatcgttgcagaatttcgcgccgtctttgttctcagattgacagttcggacagatcatgctggctttctccctcgcgcaaatggcacatacgacgattgtagccgaaaacgggccgagcgcagccggacaacgccccgtttgcacgcttcgtgacaatacctgcagaaaataggcgagcttccaggttggcgcagccgatcggcgataagcgccgagccgttccggccgccggcggccgggcagacagagcccttaagccccttcgccgtagccgaaacggcggatctggttcgcgtcgcggcgccagttcttcttcaccttcaccgacaggtccaagaacacgcggcagcccagcagctgctcgaggtcctggcgcgcctcggtgccgatctgcttgatggccgcgcccttcttcccgatgatgatgcccttctggctgtcgcgctccacgtacacgatggcgaagatgcggtagagatccttcttgcgatcgtactccatctcctccacgcgcacgccgatggcatggggcacctcgtcgtggaacgaacgcaggatcttctcgcggatgaactcggccaccaccacctcgatgggctggtcggtctccatatcggtcgggaaccacgccggacccggcggcagcagcgccaccacctcgtcgacgaaatcctgcacatgctcgcccgtctggctcgacaattccaccacggcgtcccaatcgcccagctgggctgcggcgaagcgctggcgatccagctgctcgccgtccacgaggtcgatcttcgacagcacgaggatcttcttcgagcgcgcgcgcttgagctgagcggccacccactcgtcgcccgtgccgaccggcttcgacgcgtccacgaggaaggcgaccacgtccacgtcctcgagcgccttgagtgccgacgtgttcagctcctcgccgagggcgtcgtgcggcttgtgcaggcccggcgtgtccacgaggatgagctggaagccctcgcgcgtgagcaccgcgcgaaagcgatggcgcgtagtctgcgccgtgttcgacgtgatggcgatcttcttgcccataatggcgttgatcagcgtggacttgcccgcattcgggcgcccgaccagcgtgacgaaccctgacttgaacgaatcgccgactgcgggatagatgttgtccatgaaaagccttccgatgtttccgatgcgttagacgaacagcgccgcaaggcgcgggacgaacacggcggcggctaccgccaccgcgcccagcgcgcacacgagcactgcgccggcggcgcagtctttcgcgtgcttggcgagctcggcgtagtcgggcgacacgaggtcgaccaccgattcgacggccgtgttcaggcattcggcggccagcacgagcacgatgcagatgacgatggccgcccacgacgccgcgtcgatgccgagcgcggcgccgagcagcactgccgcggcgcccaccgcgaaatgtatcttcatgttgcgttgcgtgcgcgcagtgtagacgacgccttcccatgcgcacgagaacgcgcgtccgagcgagaaccgggcgcgcgaatccttgtcagcacggttgcggacgaacctcacgccgtccgccgcaccgtcctccggcgacggcttcccctccgtgcgttcgccttcgcccatggcgtcagtcgcgttcatgcaatccagcccctcccccgatctcagcgcttggaccaggcttcgaggatctcggcctcgcgcttctccatgacctcggcttcgtcatcttcgatgtgatcgtagccgcacaggtgcagaaggccatggacgagcagcaagctgatctcctcctcgaacgtggtgccgaactcgcgcgtctggcggctggccacgtcgggggcgatcaccacgtcgcccagttcgtagacgggatcctccgccagcgtcatagccgacaggtcgtcgtccacgccgtcgcactcgaaggacagcacgtcggtagggccctccttgtggcggtagcgctcgttgagctcggcgatagcctcgtcggtgacgaagctgatggacacctcggtgttgaagggcttgtcctcgcgcgccagcacgaactgggtcagctcgtgcagcggcagcttctcgaggtcttctttgcggtagtcgtagttgatctggatatccatgatacctcaagcctttctgcttgcctgatcgtaggccgagacgatggcggccaccagggaatgccgaaccacgtccttgccggtgaaatcgcagaacgcgatatcgtcgatgtcctcgaggatggcccgcacgcctttgaggcccgagacgccgcgcggcaggtcgagctgggtcacgtcgcccgtgaccaccatcttcgagccgaagcccaggcgcgtgaggaacatcttcatctgctcaggcgtggtgttctgcgcctcgtcgaggatgatgaagctgtcgttcagggtgcgcccgcgcatgaacgcgagcggggcgatctcgatgacgccgctctcgacgagctgcgtggcgcgctccatgtcggtcatgtcgaacagagcgtcgtaaagcgggcggatgtagggatccaccttctcggtgagggttccgggcagaaagcccaggctctcccccgcttccaccacggggcgcgtgaggatgatgcggccgacctccttgcgcttgagcgcagccacggccatggccatggcgaggtacgtcttgccggtgcccgcgggcccgatgccaaacgtgatggtatgctcgcggatggcgtcgacgtagcgcttctggcccgccgtcttcggacggatggcccggccgcggtacgtgagcaggatgtcctcgcgcagcgcctgcgggctgaactcggccgtgcgcaacaggtcgatggcgtgccgcacgtactcgagcgtaggctcgccgccgccttccacgagcttgatgagatccgagaacagcgccgtgagcgactgcacctccagcggatcgccgacgagctcgaccgtgtcgccgcgaaccgtgatccgcgaggcgaacgcatcctgcacgacatggaggatctcgtccgcagggccgacgatgagcgccatgttcacgcttcggggggccgtgagggtgatttgggtttggtcagtcatgggggcattgtaccacgcacggccggcgcgcgcttcgatgtcatcgaaccgacaagggaatatagtgcaggtgatcaagatctgccgggaacggcgaggcggttcgaggtcgcgccgctcccgcctcgcatcttcgctccgaaaacacgcctcagggtcgttttccgtgtgttacgggcgaagacgcattgcccgcacgcgcacccgcgtcctcaggccagccggtaggcccacagcgccttcgtctggccgagcaccgtgtccacgttccaggctctgttcgagcgctcggccgagtacggatcgttgatgcgcaggttcccgtcgccgtcgatgccggtgacgacgaagaagtggccgttgtcggtgaagtctccagggccgacgttgcagacgagcacggcgccgccttcgagcgccgcgcgcacgctgcccgcatcgaccgagagcgcctcgcaggaaaggccgagcgaggctgcctcgctcacgaggaacgaggagtcggtgccgtcgaacgccgtctcaaagccgccgtcgctcgcacgtttccccatatcgtagggcgacagatcgcccttgccggtgaggccctggtacaccatggaaagcgacgtggggcagcatcccgtcagcgcgaacgtcgtggagctgtacacggtggagccccagcgctgatcccactggtagagacgcggcacctcgcctgaggcggggtcgtccgtaccgagggcgctctcggccggataggcgtcgggaaacgtgcgcacgaagggcacggcctcgggctcgacggcggccagcttgagcagcttgcgctgcaccgcttcgccgtccacggcgtaggcgtccggatgggcggcgatccatgccgcgtcgtcgctcgccgaagccgcttggacgagctgggcggccaaatcgtcgccgagcacggccttgagcttggcctcgtcgataggatcgcgctgcgtctgctgctggacgggagcccggtcagcctcgtccggcgcctgcgtcgcagcgccggcggccatgcagccgcgaacgcccgcgacaagcacgacgaccagcacgatcgcggccgccgcgatcgcgaggcgcttgggaccgacggcgcgcacgaggttcgtcgcagcctcggagaaggcgaacaggagctccgagccgtgcgcctcccatgagtgccgattgcccgttccaggacggctcgaacggagacgacccgagcttatcggctcgcgcgcgtcatgcacgccgtgcgtatcgcggccggtgggcgcttccccgcgcatgcgcgccttgcgctcctcgagcctcctgcgcgcccgctcgcgcgcctcgtcgtcgcccattcgcgcctcccgttttaaatcgctattctgactagtatacagcctatcggaaaacagaggcatttcgaatcgcctcattcaagaaagggccagcagccgcaggggttcagaaaacaagagaggctgccatcatggcagatacgaaaacccgaacatcgacgcgctctccgaaattgcccgaggactcggggtgagcatacgcgacctgttccaatacgcgctctccgtgaagagcttcccgtgccggaaaacgactgccccgccgttaaaccaagattgacgcagcccgttctgagcatcgcgcgcccatggcgatccttcgcgcaaacaggccgctcgcccgctcttggcgcgccggttcgggggcgatgcgcgaccgactacagcgtcacctcgaccagcgcgcccggggcggcgccggcgggggcgggcacctcgaagtagctctccgtcatggcgacgccgccctcctccaccaaggcgagctcgacggttccggcgcggcgggcgcgctcggatgcgcgcagctcgtcgcccagcgcgcgcagcatggcggcgcgggcttccttgacggcgggcggcacttggtcggcgcgctcggcggcgggcgtcccgatgcgcggcgagtacgggaacgcgtggatcttcgcgaagcggcaggcgcgcgccacgtcgagcgtctcctggaactcggcatcggtctcgccggggaagccggcgatgatgtcggtggacagcgccagctgcgggatccggcggtagagccgctccacgagcgcgacgaaacgctccgcgtcgtaggggcgcgccatctcgcgcagcaccttcgagcttcccgcctgcaacggcaggtgcagatgacggcagacgcggccgtccgccgaagccagaaggtcgatgagcgcatcgtccacatcgcgcggctcgatactggacacgcggaagcgcgccggggcctcgccgggcgcgtgcaggtcggccgtctcgtcgagcaggcgtcgcagcagagcggccagcctgatcgcggaggggtcgcgccgtcctccgtcgcagtacgaccccaggtttatacccgtgagcacgatctcccgcgcgccggcgcgggcataggacgcgcactcgcgcacgacgtcgtcggccggacggctggtcgcgcgcccgcgtgccacgtgcacgatgcagtacgtgcacgcgttgtcgcagccgtcctgcaccttcacgcccacgcgcgtgcggaagccggatccgatatggaggggcgcgtcctcgccgggagaaaagggcgcctcgtcgaacagggcatcgatggcctgcgccagctgggccttccccaccacgctcacgcgctcgtcgagcgcctcgtagaacgcggcgtcgatggcggcggcgcagccggtgaccagcacgcgggcatggtcgttcgcgcgcagggcgcggcgcacggccttgcgggtcttcttctcggcctcccccgtgaccgtgcacgtgttcaccacgatgaggtcggcggacgcttcggacgtctcgacaccgcgcagggcgaggcgcgccgccgcatcgtccgactccacgcggttcaccttgcatcccaggttgacgacggcgaaattcacgattgcccgcctgcctcgcacgcgtccccggcttcctcgcgacggctttcgacatgggcggacgtgcgttcctgcgcttcgcgcgcgtcgtgcatcatgcggcccagctcgtgcaggacgagcgcgggagccacgatgccggccgtctcggttcgcaggatggacgagcccagcgacacgagcgacgcacgcgggttgcaggccaggagcgcgtccgcctcgcttcgcgaaaggcccccttcggggcccaccaccacggcgatgcgcgcgttctcgggaagcgcgcggtcgagccggaggccgcgctcgagcgccttctcgatgcgcgcgtccagcagcgcctcctcccagcacaccagcacggcggtggcgtgcgccaaggaggcgcacacatccgccagcgccatcggctcgcccacctcgggacacgcgcgctggccggactgcatggccgcgctcttcgcgatggcgcgccatcgctgcgtcctcgccgcggccttcctcgcatcgagcctcacgatggagcgctcgcacgacatcggaacgaacgccgaaacgcccagctcggtggcgtggcggatcaccgtctccatcttgtcgcccttggccaggccctgcacgagcatcacgagggggcgctcctcgtcgtcgaggcgctgcgcgatgcgcaccaccgggaccgcatcgtcgaaagcggcgatctcgcactcgaagtagtcctgcgcggcgtccaccaccgcgatatgctcgcccggcgcaagccgcagcacgcgggcgtgcttcgcgtcgtccggcgacaaacgcagcgggaaagtcggcgccccctcgtcggcaagcacctggtcgtgcaggtagaaatgctgcagggacatggcgacccgctagttgaacgcgtcgcggagcttctgaagcggggtgcgctcgtcggccacgtcctcgcccagctcctcggccagcttctccagcagctcgcgctgcttcttcgtcaccttcttgggcaccacgacgttcacgtgcacgtacatgtcgccgcgcgactcgctgcggaacttcggcatgccgaagcccttcacgcgaaccacctgctcgttctggcagccttcgggaatgcgcacctgcaccttctcgtcctcgaagatgccgtcgatctcgatctcggcgccgagggtggcctgcacgatggaaacgttcgcgcgcgcatgcaggttgtcgccgtcgcgctcgaagaactcgtgcggctggatgcggcacgtgacgatgaggtcgcccgggcgggcgccgtgcatgccggcctcgccgaaaccggacaggcgcagctgctgggcgtcgcgaatgcccacgggcacctcgacggtgacgcgctggcggtcgggcacgcggccctgcccctcgcactcggggcacgggttctcgatggtgtggccggtgccgccgcaggtcttgcacgtggtggccgtctgcatgtcgccgaggaaggtgtgctggatggtgaccacgcggccctggccgtggcaatcggggcaggtgatctcgcgaccgtcggggccgaggcccgacccttcgcagtcggggcacggcgccaggcgatcgtacacgatctccttcttggcgcccgcggccacttcctccagcgtcaggcgcaggcccacgcccatgtcacggccttccttgcgcataggcgcgcggccggcggcctgcccgccgaagaaggagctgaagatgtcgcccatgccgaacccgccgccgaacaggtcctcgaagtcgacgtagccgccgcctccgtaggggctgccgccgccggccgcgccgggaaccgtgccgaagcgatcgtatgcgctgcgcttctgcgcgtcggacagcacgtcgtaggcctcgttcagctctttgaactggtcctcggcatcgggcgccttgttcacgtccgggtgaagctcgcgcgcgcgccgacggaacgccttcttgatctcgtcttcggtcgcctcgcgggacacgcccagaacttcgtacagatccttcgccattgtacgctcgttacctttcctcatagacggcgcaggacgcgccgcctcccatgtcgtttacacgtcctccagcgccgcgctcgcgatgcgcaccgcctgtataaccttggaataatccatgcgcgtgggacccaccacggcgacgacccccgccgacgcgcctcgcccgtagcggctggccaccaccgacacgcccgctagcgcagccgcgtcgttctcgcgtccgatgcgcacgctgggcgcgcccgagccctgccgggcggcatcgtcgaggatttgcagcagcaccgtgtcgtcctcgagcacctgcatgacgggcagcagcgcctgggactggctgaactcgggcttcgtcagaagcgagctcacgccgaggcgatgcgtgcgcgacgcgtcgccttcctgcaaacacgacagcacttcgtccagcgccatgcgcacgagcgggtcgcggaacgcctccgccatgccctcgcccaggccgtcctcgatctcctgaagcgacttgccgcccatcacctcggcgaggaagcgctgcacgcgcgccagctcgtcgggcgacacctcctcggcgaagtccatctggcggttgaacacctggccgtcctcggtgaccaacaccacgagggcgcggtacggcgacagcgagatgagggacagctgcttgatgtgcaggttcagcaccgacggagccagcacgatggacaggcagtcggtaaggcgcgtgagagccgacgacgtctgctccaggagcgcgtccagctcgcttgcgctgcggcgcagctggtccaccacaggccggtagcgctcgtcgtcgccggcaagatcggacgccagcaggttgtcgacgaacgcacggtagccgaagtcggtcggaatgcgcccggcggacgtgtgcggctgcgtgatgtagccgccgtcctcgaggacggacagctcgttgcgcaccgtggccgggctgacgcccaactggtagcgctccgtcaacgtgcgcgaccccacgggtagggcgcgcgcgacgtattcttcgatgagggcgctcagcacccgttgccttcgatccgaaagcacgctcctccacctacctctctcgccagtcggcttacctgaaccatagtaacgcatcatattagcagccgaaagccgagagtgctaacaacaggcggaaattatggagaaactcgacgggagacgcacaaggagcgggcgcgcgtcagtcggccagatcgaatagggcgccgtacagctcgttgccgcagagccagccgcgctcggtgggccgccagcggccgccttcgtgctcgacgagcccctgccgctccaagtcggccagcaccgtcgtcgcctcgggcagcaactccgcggcgcgggcggcgtgctcgtcggacacgcccgcggtcatgcgcatgcccagcataaggttctcggcggccatctggcgcgggtcgaggtcgtcggtcacctggccgtccttcacccgcatgcgacgctgcgcgttctgcgtcatcgtggcagccgaacggcccagacccaggtagggcacgcccgtccagtacgcgatgttgtggcggcatgcaaagccggggcgggcgtagctggccacctcgtagcgctcgaagccctccgaatccagcacgcgcgcggcgatctgcatgtgcgcggcctccacgtcgtcgtcgggctcctccagctcgcccgccagcaccgcggcgtcgaagggcgtgtgcggctcgatggtcagcgggtacacgctcacgtgcgtcgcgccgaggcgcacggcctcgcgcacgctcgcctcgaagccctccgcgctctggccggggatgccgcacatgagatcgacgctcacgttctcgaaccgggtgcgggccgcctcgatggcacggcgggcgtcatcggaggaatgcgcgcggccgagcgtgcgcagaacgtcgtcgtcgaagctctgcacgccgatggacagacggttcacgccgagcgcccagatgtcgcgcaccatgcgctcggtgaggctctcgggattcgcctccatcgtgcattctacctcgtcggtgaggtgcatcgacagcgacagcgtgtacagcagcatcgacaggcccgccagccccacatggctgggcgtgccgccgccgaggtacaccgtctcgaccgcccccagctcgccttccttagccttgcggcggatctgaaggctgagatcctccacgtacgcttcgatctcgggcgcgccggcgggcacggccgccgtggcgaagtcgcagtaggcgcaccgcttcacgcagaacggaagatgcaggtacagcgccttgtacggatcgtgcggcatgagcgcctctcttctcactcgtgggcggcggcatgctccctcgcgcatgccagcagctcgtcgaacacctcgtcgaaatcctccacggacacgcagccgttgatcctgccgcgcgcggcggcggcgccgggcagccccgccaggtaccacatagcgtgcttgcgcatgcgcacgatgttcctgccttcacgcgcgctgagcagccgcgcgtggcggcgcgcgagcgcgatgcgctcctccacggtgggcccgtcaggctccggctcgcccgcaagcgcagccttggcctgggcgaacagccaagggtttccctcggcggcacgcgcgatcatcacggcgtcgcagccggtgcgctccgtgatggccacggcgtcggcgccgcttctcacgtcgccgttgcccacgacgggcacgctcacggcctccttcacccgcgcgatagcgccccactcggcgcgcccgcggtacagctgctcggcatagcgcccgtgcacggctatggcgcaggcgcccgcgtcctccatcctccgagcgaactcgggggcggtttcgtcgccctcggcccaccctcgacggaacttcaccgtgacggggcggctcaccgctgcgcgcaccgcgcgcacgatggaggcggccagcgccggatccttcatgagcgccgagccgtcgcccttcgacacgatctttctggccggacagcccatgttgatgtcgaggtaggccagcgactgccccatctcgcgctcgatccacgcagcttgggcggccatcgtgtcgggctcgtggccgaacagctgcacggccacctggtcctcccccggcgcgaggcgcagcagatgccgcgtcttctcgttcgcgtaggaaagacccttggccgacaccatctcggtgtaggtgaggtcggcgccctgctcgcggcagagcgtgcggaacgcctcgtcgctcacgcccgccatgggggcgagcagcagacggcggctccggaagaacgcgtgcatatcctccatggcgctacgaagccatgatctcggccatgttgaccaagacgaaccccagcagcactacgatgcccacgacggcgatcaaacaaccgcagcccagcgcgagcttggtgccgcccgacgtggcggcgcgcatctcgtccttcgcggccttcttctcgtcgaacgggtcgtccagccaatcgaaatcgtctttgcgtgccatgctctcaacctatctgcatcagtcgtccaccttcaggatggccatgaacgcctcctgcggaacttccacgttgccgatgttcttcatgcgcttcttgccggccttctgcttttccagcagcttgcgcttgcggctgatgtcgccgccgtagcacttcgccagcacgtccttgcgcttcgccttcaccgtctcgcgcgccagcacgcgcccgccgatggctgcctggatgggcacctcgaacatctggcgcggaatgatctccttgagtttctccgtcagcacgcgtccgcgatcgtacgccttgtccttgtgcacgatgaacgacagcgcgtcgatgggcttgcccgaaagcagtatgtccagcttcaccagcttcgagggcttgtagtcgtcgaagtcgtagtcgagcgaggcgtagcccttcgtgttcgacttaagcttatcgaaatagtccatgataagctccgacaacgggatctcccacagcatctccaccgtcgtgggagacagatagttcatggtgacgaaggtgccgcgccgtgccgtggtcagctccatgaccgcgcccacgtagtcgggcggaatgaggatcttcgccttgagatagggttcctcgatgcgatcgatctcgccgggatcgggcatctcctggggcgagtgcagcgaaatcatctcgccgccctggcggtacacgtggtattccacgcttggcgccgttgccagaaggtcgaggccgaactcgcgctcgaggcgctccttgatgacctccatgtgcagcaggcctaaaaagcccacgcggaagccgaagcccagcgcgtgcgacttctccggctcccaagccagcgccgggtcgttgagcgacagcttctcgagcgcctccttcagaggctcgtactggtcgccgtcgagggggaacaggcccgtgtacaccatgggcttggcgtcgcggtatcccggcagcggctcatccacgccgccgcgcacggcggtgatggtatcgcccaccttcacctggcgcacgtccttcaggccggtgaccaggtagcccacctcgcccaccgacagctccggcagcggcgtctcggccgggcggcgtgctcccacctcttccaccagcacctcggtaccggtggccatcatgagcaccctgtcgcccttcttcacggcgccgtccaccacgcgcacgagcgccaccacgccgcggtacggatcgaagtacgaatcgaagatgagcgcgcgcaagggggcgtcggcgtccccgacgggcgcgggaatgttgtacaccacggcctccagcagatcgtgcacgccctcgcccgttttgccggacgcgagcaccgcatcgtcggcggggatggccaggccctcctcgatctcctcgcgcacgcggtcgggctcggccgcgggaaggtctatcttgttgatgagcgggatgatgtcgaggttcgcgttcatggccatcatggcgttggccacggtctgcgcctccacgccctgggtggcgtccaccacgagcacggcgccctcgcacgcggcgaggcttcggctcacctcgtaggtgaagtcgacgtggccgggcgtatcgatgaggttgaactggtaggtctggccgtcgtcggccgtgtagtccacgcgcacggcctggcttttgatggtgatgccgcgctcgcgctcgatgtccatgctgtcgagcagctgggcctgcatgtcgcggctggccaccgtgcccgtgagctcgaggacgcggtcggacagcgtcgacttgccatggtcgatgtgcgcgatgatggagaagttgcggatgaagttcggatcggtggtcatagcctgtctttcaaatgacgcgcgctcgcacgcatgcgggcgcttcgggaaaacggagcctattctaccctattcgcgcgctgcggacagggttcgcgcgctacagttccacgacagcggtcgcatcgctcgcggaatcgacgcgcacgagcttggcgcgagccttgtcgccctcgtccagacacagcgcccagaggccgtcctccagctccacgaccgcctctcccccgtccaaggcgacggacgaatcgatcacaggcacgaaacccgagccgtcctcggcagtgaacacgggtcgcgcgacgacggcaaccgcggctcccgatgtcttgacctgcacccgcgacccgctctcaacggtttccgagggcaccgtcgctccttcgtagacgggcttctcgtcggaatggcatgaggagcaggcgacgttccggtcgatcacctgatgctgggacgcgccggagcatcctgcgagggtcacagcgcccatgaggggcagcgcggcggcggccagtacgcggacgggcaagcgaaagtcgcaacggtgcatggaaggctccttttcccaggttgatggagaaacgtgcgcgattttgcatttgtgcgtgaaaaagcgctcaacgtttgctattctatcgcattgtgtatccggcaaatacgttcgcgcgatggtttcatcgccgatctgcagacgtggctgcgcttcaagattcgtacgtgccggtgaccgattggtccgcgaaacagagaaatcccgcctgtttcaccatgcatcgaggctgcccgcctgcgcgggcgcgccatggttcccccgaaggggatcgcatgcgaggctgtcgtcaccgtgcagttgcgactctcgagatcgccaaacgctccgcatcgccggaaacgcacggtatcagacaggttttgcaaattggaggaacatcacccatggcgaacatcaaaagccagaagaagcgcatcatcaccaacgagaagtcccgcatgcgcaaccgcgcggtcaaaagcgagctcaagaccgcgacccgtcgcatgaaggacgccgtcgccgccggcaacggcgccgaggcctacgccgccgcgtgcgccgcgtgccgcctgatggacaaggccgcctcgaagggcgtcatccacaagaaccaggctgcgaaccgcaagagcggcatcatggccctggccaacacggttgccaccgacgccgatcgcgccgcctacgtgaagccggccaagaaggagcagaagaccggctccaagaaggccgagcgcaaggccgcccgtctcgccgagatgaaggccgcttccgaagagaaggccaagcgccgcgagaagcagctcaaggaagaggccgccgctcagaagcgcaaggccaaggaagccgaagaggccgccaaggccgaggctgccgaaggcgccgaggaagctgccgccgaataacgatccatgcgcatacggcactcgccctgcgatccgtccgcatatcaagagcgaaggagccccggaaatccggggctccttcgcgttagagggctgttatcctgagcggaaaccgcggattgtccccgctgtcatcccgagcgagcgttctgcttgcatttttgacgacaacctgaaacgctagcgcctcgccgtcaccgccagcacccagtccaggaaagcgctcctgggatcggcgccgctcttcatcgcgcgctcggtgtcacgcgaagagatgatggcgcgccgcagttcggcggcagtgaagccgcgggcccagttgacatggttcttcacgcgccagtcgggcgctttgagcgccgcggccacgccgcggggattgccgcgatcggccatcgagcgcgcgcagacaagctcgcgcagacgcgtcgtgcacatggccagcagcgcgtggggcgacacggaatccatacgacccaggtacagcaggcacttgcgcacgtctcgcgccgcaaaggcgtcgacgaactcccaaggcttcacctcggcggtgcggctgaccatgtcgacgatctcgtgctcgttcaccgcgtcggtgccgcgatgcgcgagcgcgatctttttgagctcgctgtcgagatgcaccgtgtcctcgccgacgaggtcgacgagcttgacggctgcgccctcggtgagcgtgacgccgtgggtcacggccatcgagcgcaccgttcggggcagctcgtagcgcttgagcggtgcgcaatcgataaccgccgtcttgccgcaggcggccacggccttgtacaggcgcgtgttcttcgccagcttctcggcgacgagcgcgagcaccgtggagccgttcggcgaaccgagatagctcacgagctgttcggcatcggctttcttcagcttgtcggccgcgcgcacctccacgagacgcacggggctcgcgaacggcacggtgttgcaggccgtgacgatgtcgccgccctgcgccgtctcgccgtcgaactcgtcggcgttgaacgacagatcgcccatcgaggacaggcgcgcgcgtaggcgcttcatcacggtgtcgcgcttgagcgcgtcctcgcctacgataaggtagacgggcagcagcggagcttcttgtttcttttgagtagccatgccgttcattctaacgcagggtatccacctcgatccggtcggcggtcaatttgcacgaaacatctccctgctcgtcggtgcggaagacgcgtgcgcccgcggcctcgagccgatcgagcgtgtcctgcgccggatggccgtagcggttgcgcgcccctgcgctgaccaacgcgatgcgaggagaaaggacggcggcctcctcgtcgtcgagggcgttcttggatccgtgatggcccaccttgtagaggtcgacggagtccacaagcccttcgtcgatgagcgcgcgcagctggtcgcgctcggcgtctcccgtgaaaagcgcacgccactcggatgcgccgtcgccgtcgatgtccgcatcggcgacaaggcacaggctgtcggcgttgcccccttcgtcggagaaccgctcgggccacactgtctgcaagtcgaaggagcccacctgaagcgcatctccctgccgaagcccgacgactcccccgtcgcccgcgagcttgcgcgcgtcggcgacgagcgagacgcacgcttcgcagccgcacgagagcgcgtcctgggcgacgagcacgcgtcgcacgtccacgacgcccgcaagcgaggcgagcgatcctttatggtcgtcgtcgccgtgggtgatcaccaccgcgtcgaggcggtacgctccatgccgtgcgagcgcctcgcgcagcatcctgtcctggttgccggtgtcgatcaggacggccgtcccccggctccgcaccaggaacgcgtcgccctgccccacgtccagcatgacgatctcgtcgcccgaaaggcgcggggcgacgacgaccgtcccgatcatgacgcacgccgccgccgcgaccagaccgaacgcgcgacgacggctcggacgcggccacgccagccacagcgccgccgcgcatgccgccgacgccagaagcgccccggcgaggggcacgctcgcaggcaggctcgcgtaggggacgctcgcgagcgcgcgcacgacggcagtgagggcgcctgtgcccatcgacgcgaatccgatcaacgccggcgcgacggcaggaacggccaaggatgccagcaccgccgcgaacccgccggcgcagactacgggaaacagcggcgcggccgctacgttggccagcggcgccacaaccggcacctgcgagaacagcgatgcggcgagcggcgcggccgcaaggctcgaagcggcggtaagcgagagcgcctcgcgcgccaggcgcggagcgcgctggaagcactgcgcgatccacgcctggaaaagccctgcgaacagtacgatgccgagcgtcgagagcgccgacagcgcgaacgagaccgccagcgccgtgcgcggatcgagcgcgatgcagccgatcatgcatacggccagcgcgctgagcgccgccggccgccgccgcgccgtgaacgcgaacatgccggcgaacgccatgacggccgcgcgcacggccgacgagggcgcggccgccagcacgaggaagcccagcagaaacgacgcctgcaggacggctccggcgcgccggggaacgcgcagcgcacgcaagagcgcggctgcgcagccggcgacgatggacaggtgcgcccccgacaccgccacgagatgcgcaagcccgctggtctggtaggcggcgtacgcgtcacctacctcgagggcgccgcgccatccgcacacgagcgcggcgagcaccgcggccccgtcgtcggtcccctcgtcggcgatcaggtcgatcgcgcgattgcgaagccctgtcaagataccgagggcgtcggcacgctcgcagctcacgactcggcgcgccgtgccttcgagcaccgcgccctgccgccagcagtatgccgccgacgacccgcccggcgcggagagcgtcgcgtcggcctccagcacgtcgccgtaacgcggagggtcctcgccttcctcgaacctaagccgcaccgtaacggctccgatgtcgggaaggttcgcgcgcgcgaagcacgttgcgccataagggccctgcgaaccgtcggctgcgacttcgaatcgccagcgtcccgaaaggccgtcgccttgcagctgcgcctcgtgctgcgcggccgcgcacccgcctgcgagcgcgatgccgagcgcggctcccagcagcgcggcccacgcgatcggcaccggcagccgccatagcgcgaaagcgcatgcgacgctcgcgacgatgccggccgcgccgacggcgaggcatgcgccggcatcccaggatccggatgcggccagcaccgccgcgcacgatgcccacagcgaaagcgcgcaggccagcacaggcggcagcgccgggcgcggaggaagcgcgaccggtttgccccgcgcagcgcccctcatcccacgcatacgagatcggccagatcggcgaacttcttgtccccgatgccggacacgcgcttgagatcctccaccgtgcggaaggggccgttcgcctcacggtcggccacgatcttctccgccgtggacggccccacgccaggcagcgcatcgagctcggccgccgtcgcccgattgaggtcgatcttgccgcccgtcggcgaagcagccgccccggagcccgcatcgccgccgtccacggccgcgcccggctccaagacagcctcctcctgcgacggcacgacgatctgctcgccgtccgcgagcacgcgtgccaggttgagcgcgtcgcgggcggctccgtcggcgaaccctccggccgcgtccaccgcgtcctgcacccgcgcgccctccgccagctctcgcacccccggttcgaccacggcgcctcccacgtgcacgaagacggttcgcgcctccacggaagcggcgccgtcctcgtcggtaccgtcggaagtcgccgcgccgtcgtcgcgagagagcgagaagccgtccgacgttccggccttgaccagcgctcctcccgccgcgatgagcacgatggccgcgagcgccgtcacgcccacgagcaccggcaggcgcacgccggtcaggtgcgccttcgcccgccacgactccgcccgctctgcaaaccccatgccgccccctcgcccgtcgccgattcctctccttccatgatagcgactccgactcacgcgccgatggcgcagatccagcgaaacgcgccgcgttttccagcgcaccttccacgcgtttccaacgccgattccacgcgccgtcgatgccgatccagcgcggtttccacctgccgcgccaacgaatcccacgcgcatatcacgcgcgaggagtaccccgcttctcgtcagctcgaatacaagctgcgctgggcccgtcatcctgatcggggcaccgcaggtcgtcatcctgagcagagcgcgcagcgcggagtcgaaggatcccgtgcggtgccagccgcggcgcttccagctgatgccgcacgggatccttcgactccgcgctgcgcggggcctccctgggctcgcttcgcgtgctcgggagttcgacagtccgctggactgtcgaatgctcgcgctcgctcaggatgacagggcgagagctgcgttcgctcgggacgacgaaacggggcaagagaaagcggcgcccccgaggtatttcccggggacgccgcttttgcgagcttctgcaaccggccgcgctcaggaagcgcgtttcttcttcggcttgtaggcggggcaggcgtagtcgcgaacctctgcggcgtcggcgatctcgggtacccagcgctcgatgggcagcgcggcctcggcttccaacaccacgggcagcttcgcatgcgtctccggactgcgcggcatgaacagcgtgcagcagtcgggcgcatcctgcgacgagatctcgaacgagcccaaacgctcggcttcggcgatgatctccagcttgtcggtgccgatgagcggacgaaagacgggcaggtcaaccgccgcgtcagtgcagcggatgttgtcgagcgtctgcgaggcaacctgacccaggctctctcccgtcaccagcgctcccgcgcgctcgcggcgtgcgatctcctcagccaccttgaacatgagacgacggtacatgatgacgcgcagctcgggcggcacggtcagcgcgatctcgcgctggtagtcgccgaacggcaccgcgtacacgcgagcgatgcagcccgtgcgctccagcacctgcgcgatgtcgtccacgaggtactcgctggcatcggatgtttgaggtcgtccggagaagtgcacgcctatgcacaccgcgccgcgccgcgcgagcttccacgtcgccaccggcgagtcgatgcccgacgacagcaggctcacgaccaggcccgaactgcccaccggcagccctcccacgcccggcagcgagcgcgcgtacacgtacgccgcgttctgcaccacctcgacgcccaccgtaacgtcgggcttcttcatcttaacggacttctcggggtgcgcggcgcacagcgccgagccgatgatctggttcatgtccatcgaacccgtggcgaaatcggtgtggttgcgccgcgccgccaccttgaacgtgtcgaactcgcccgcctcggccatcgccgcgagcgccgcctccgtcatctcgtcgaggtcgcgctcgcacttgaaaccgcacgacacgcgcgctacgcccggcaccttgccgatgacgtcggccgcctccttcgcggtggtccaatcggtgccctcacgcaagaacacgcacaaacggcccgcgatgcgatggataacgaccacggggaaaggcttcagcagcgcttcgaggttcttgagcaacctcatctcgaacgtcgatcgattgtgccccttgagcccgatctcgtggtaatggaccaagcagatgcgttggaattcagtcatggatatccttcgatgcagagagatcgcgcgtagcgcgaaacgaacacgcaggttggcgcagcacgtcagcgagaagccccgaggcgccttgcaatgccgcgaaagcccgaggaagcgtacttccgtacgcgacgagggcttggagcggcaaggcgcggtgcctcggggcttcgcagcgtcgagcagttccgtcggccgtaggccgacggaatctcttagtggtagttgacgtcgatggagttgggatcgtacgacacttcgccgcgggcgatttcgttgaaagccagcgacagcggcttcttgtcggccgcgcgcgcgatctcgaccgccgtctgcagctggatggcgcggtcgcgctggccgcgcatcatgtcgttgatgtcgtgcgcgcgcttggaagcgagcgcgcacagcaggaaacgatcgttgtcagtctcgttcaacaggacgtcgatcttcggttcgataatgctcatatgcgtgttaacctcgtattttctcggcttgttcgttgacgtagcccgctaatgcgcggacagcttcgtccaaatcgtcgtttaccagccgtatatcatactccattttacgggaaagctccacccgcgccgtctccatccgcgtggcgatggcctcctccgtctctgttccgcggccgcgaaggcgcgcttccagcacgtcaagcgacggcggctcgatgaagacgagatgcgccgaagggaacttgtcgcgcacctggaatcctccctgaacgtcgatttccaggataacctgatcgccgcacgcgatgtgctcctcgacggtagcgcggggcgtgccgtagcagttgccgccgtacgtcgcccattccagcaggccgtcctcgtcgacgagctcctggaattcctcaggggacgcgaagcggtagtggacgccatccacttctccctcgcgcggcttgcgcgtggtaaccgacatggacacccaagcatcggggatctcgcgcaaaagacgggccaccagcgtgcccttgccagcacccgatggccccgagatgacgaacagattgccgtggcgcataggtgcggttagcccaagcgctccagcagggcggtctgctgacgctcgcccagaccgcgcagacggcggctctcggcaatctggagctccttcatgatcttctcagccttggccttgccgtagccgggaagcgtctcgatgagggtggaaaccttcatacggcccacgaccggatcgttcttcatttcaagaaccttctcgagcgtgagcttgccggacttcaggtcatcgcgaacctcggcgcgcttgatgcgagccgccttcgccttttccaaagccgcctgacgctcttcagggctgagttgaggaatagccatcgtgttatctccttctgttccaaaacgattccgtgatactatcacgcattcgcccacttcaccttgtcttttcctacaaatcctaaaaatttcagtgcgtggtcacacattctagaagcagttggctcctttgtcgaccattcgtcgcccaaccgtcattttcccagaccgcacgcaagttcgacggggcgcctacagctcggccgcgatggactcgaatgcagccgccggatcggccgcctgcgtgatgggacgcccgatgacgatgtgcgacgcaccgttggcgaacgcctgggcaggcgtggccacgcggctctgatcgccgcgatcgctgcccgcagggcgcacgcccggcgtgacgatgtaggcgtccggacccaggatctcgcgcagacgcgcagcctccttcggagacgccaccacgccggagatgccggcgcgcttggcctgctcggccagcacgaccacctggtcggccatggcgcggcttacgcccgtttcggccagagccgcatcgttcatgctggtgagaaccgtaattcccagcgtcgccggcgcatcgtgaccgtactcggacgctgcgcgctcggcgcccttctgcgccgcagccatcatgtcgacgccgcccaccgtgtgcatggtcagcatatcggccccgctgccggccgcggcgtacgcggcgccctccacctggtgcggaatgtcgtggaacttgaggtcgaggaacaccttgaagccgcgctccttgagcgcgtacacgacggccgggccgttcgcgtagaacagcgtcattcccaccttcatccacgtcgccttgccctgcagctggtccgcgaggtcgaaggcctcttcgatgccgcagtcgagcgccacgatcacgcgatcgcgcgcgggaacctcttcgaacgaactcaccattccaaagctcctatcagttgctgcacgtcttcgatgccgtgcctttcgcaatactgcgccattccgtcgatgatttcaaccgtggcgtgcggattcacgaaattcgcggtgccgacggccaccgccgtggccccggccagcatgaactccaccgcgtcggtcgcgcacgagatgccgcccatgccgagcagcggcacgtcgacggcctggtgaacctcccacaccatgcgcagcgccacaggcttgacggccgggcccgacagtccgcccacgccgcgcgcgagctgcggtcggcggcgctccgcatcgatggccatgcccagaagcgtgttgatgagcgacagcgcgtcggcgccggccgacactgcggcgcgcgcgatctcggtcacgtcggtgacgttcggcgtgagtttcacgatgagcgggcgcttcgtggcggcgcggcaccgggacacgaccgcctcgacgctgtccgtgcacgtgccgatggtcatgccgcccgcgtccacgttcgggcacgagatgttcacctcgtacgcgtccaccggcacgtcttccaacgcctcgatcacctgcacgtactcgtcgaaactgtggcccgacacgttcacgatgaccgtcgcgccgcgctcggccagccacggcagatcgcattccttcaagtgcgccacgccggggttctgaagcccgatggagttgagcatgcccgaaggcgtctcggcgatgcggggactggcgttgcccgcccagccgttcagcgacacgcccttcgtcgtgacggccccgaggcccgccacgtccacgaagtccccgtactcgcgccccgcagcaaacgtccccgaagccaccgtcaccgggttcttcatctccaacccgccaagattcacgcgcatgtccaccgaagtcggaacagggcggcggggacacccctccaccaagcgagttccgcagcgaatcgaacagtcctgcggactgttcgaccgagcgaggactgtccgagcgactggaggggtgtccccgccgcccgaccgaacaggttgcgttgcgttgaagctatcgcccatctaccataccaccttccgcgcatcgaacacggggccgtcgacgcaggcccgctgcttgccgcccaccgtgtccaccacgcacgacaggcatgctcccacgccgcaggccatgcgcttctccatggacacctcgcagggcacgcccgcctcggcggccatgccggccacgatcttcataaggggctcggggccgcacacggccagatagtcgtacggctcccccgcttctgcagcttcggcgagcgcttcggcgacgagcgaggtgcagaagccctcgcgtccgaagctgccgtcgtcggtggcgcagcgcggcggctcgtccagcagcgcctcgtagcggccgcgacacgtgagcgccgcctcggtctgcgcgcccagcaccacgtcagtgcgcacgccggcgctaatcagactctcgcacagcatgaaaagcggagcagcacccacgccgccgcccacgaggagggcgcgacgcgcgttcgcgggaggctgccacccgcggcccaccggcccgatgagctcggcgccggagaggtgctcggctcgctcgggctcgatgcgcgtcatatggtcggtgccgaagcccaccgattggtagagcacctcgagcgtgccggccgccgcatcgcgcgcgtacaccgagaacgggcggcgcaggatgtgcgcctccatgctcggcaccttcatgtgcacgaactgccccggctcgatgctcgccgcgatatgcgaggccgcgagttccatgaggtagaggttcgggccgacttcctcgttggcgaggatgcgggcccgctcgttgacgagtgccacattcgtcctttcacttttcgccgccgcccgtgcgagcgcggcgcgcgttttcgtctctcggccgacgattgtatcatctgcgcgcgcttcatgcggctgacaagccaaaatgcagggaatgtgcacgccgggacgacggagggagcgaacggcgggacctaccgcctgcgtcgcacgggagcacaggcgtggcgaggccgcgcgaatcggcgctccccgtaccggcggaacgcgaacgacacgagcagctgcgccgcgacggccgcgagcgcgcccacgagaaggccggccagcacgtcggtgggatagtgcaccacgagatagcagcgggcagcgcccatgaccagcatgacgagcgagccgccgagcaccgttttccaattccgatacgccagcatgagcgccgccatcgccgccgaggccgcggtcatgtgcccggaggggaacgagaacccgtcctcgaacgcggcgccggcgaagcgccaccagtcgaggaagagcgcggaacgcggcgaacgtgtcgttcagccacgcggccgtcagggttgtttccatcgaaccgtcctttcgcctcacggatgctgcggatcccttgcgggtccgagcctcaatgaaacgacgcgcgcctccccggcggcaagccacgatgcgtcgcacgggcgacacggtgcgtgacctccgcagccgaccaggggttacgagcgcagaatacggtagccgacgacgaccttcgccaggagcagcgcgaacatgagcgttgtggcgtagggctgcatggtggaggcgaacaggacgacggccagcgcctgcaccgcgaacccgacgagggcgacgatgcgggccgcgcggcgcgagcccacagctgccagcacgatctccaccgcgcccatgaacatgagcgagacgacggccgccgccatggcggcgaacgacgcgccgaaatccacggacgcgccgtagtcggccaggttcgccatgcgcacgagcgagccgtcgtccacgccgtatagcggaatgaacgcgaacacgacggccagcacgtcgagcagaccgaacgacagcatgccgctgctgcgcgccgtcgagcggcgctcgtcgcgggcgagcacgatgaggtcgtcggtggacaggaggtcgtccaccgacacgtcgaataggcgcgcgacgacctgcagcgagtcgaggttgggcgagccgccgcccgtctcccacttcgacacggccgtgcgcgacacgtacagcttggcggcaagctgctcctgggtcaggccgcgctcggtgcgcagcgctttcagcttctctccgaaatccatgggacgcgccccctttcaggctcccaagatggctgagccgcatcgctccggcaagacacgtttcgtgtcatcgcccgtccacgcaggtcgcaggcttgcgcgcgactacggcgatcgtcgggctcacctcgtcgagaggtgcgccaaccgcgtcgccgacaagctccgccatttcgaagccggcttcttcgagctccgccgagagcgttgcaggcgctccttcttcgacggttcgtcagcattcgaagcgatcattctaccatctgatatcatgctgtttccgaacatgacgccgcgaccgaaggagcaccgtggagaagctgccgcccatcgagaaagtgtacgaggcatggtccgccgtcgccgacggacgcgtcgagctgcatcccgacgagcgcggcctcgatgccgatcgagtcgaagcgtcggcgcgggaagcctacgacgcgctgggcgcgctcgacatagccgtcaaacgagggtcggccagaccgccgaagtcctcgaaggcgtgagggagagttctgatcgagcgagggcgcgtcagccgatgcgccctcgcttctatgtttccgcacgttgaattccaagcggcatcaagagccgtcgtggacgagcttgagaccgataacgcaagctatgaggccgatgatgagcagcactttcgccaccgatacgggctctgttcccgagagcatgccgtaggcgaccgtgagcgaggcgccgatgccgacccaaacggcgtacgaggtgcccgttggcagcgttttgaccgcgtaggacaagccgaccatgctcaacgccagcgcaaccaggaacacgatcgaaggcgctagcctggtgaacccctccgcgcgcccgagcgccgtggcccacaccgcttccaaaacgcccgatacgataagaacgacccatgccatgagaagacccctttcgtaggttatgcgccgtcttttcgatcctggtacggctgccctcgtcagggaatcatgcgaaacgatgaaacgccttcagtgtagcaaaccggaagcgcatcggaaatcggaagccatcgccttttcgcccggaaaacacggttccaggtgcgattccgtgttttccgggcgacgatgcgcgcagaacgcggcgcgtcagcgcgaaagctcccactggggcaggtcctgcaaggccacggccgcgaggccgccgaggcgcgcggcttccatgccggccaccatggcctgggcgccggcgaggttcgtcacgtgggtcacgccgtgcttcacggcctcgaggcgcagctcgtagccgtcggcgcgcgtggcgtggccgaacggcgtgttgatcatgagcgcgatgtccccggcggcgatcatgtcgcgcacgttgccctcgccctcgtggatcttcctcacctgctcgcactccacgccggccgcccgcaacgtgcgggccgtgccgcctgtggccacgatgcgaaagcccagacgcgcgatgtcgcgagcgatgggcacgatggcgcgcttgtcgcggtcgcacacgctgacgaacaccgtgccgccctcgggcagcgcgtagctgatggccagctgcgtcttcgcgaacgccgccgggaagttgcgcgcgatgcccatgacctcgccggtggacttcatctcggggccgagcaccgtgtcggcgccggggaagcggccgaagggcatgacggcttccttcacgctgaaatgctcgagccggcggtcgtcgggcggcatccccaaatcggccagcttctcccccgccatgatgcgcgcggcgaccttcgccagcggaacgcccgtggccttcgaggtgaacggcaccgtgcggctggcgcgcgggttcgcctcgatgatgtagatgacctggtctttgatggcgaactggatgttgatgagccccaccacgcccaggcgcagcgccaggcggcgcgcgatggcgcgcagctgcgcctgcacggcctcggacagcgcgaacggcggcgtgcagcaggccgagtcgcccgaatgtatgcccgccatctcgatgtgctccagcacgccgcccacgaacacctgctcgccgtcgcagagcgcgtcgaggtccacctccaccgcgccttcgaggaagcggtcgaggtacaccgggtggtcgggcgagatcttcgcggcctccgccatgtatttctccagctgggcgccgtcgtagacgatgcccatgccgcgcccgcccagcacgtagctggggcgcacgagcagtgggaagccgatgcggtcggccacgacgcacgcctcttgatacgtggaggccatgccggcggccgggtatacgatgcccagctcgtcgaggacggcggcgaagcggtcgcggtcctcggccaggtcgatggcctccggcgaggtgcccatgatgggcacgccggccgccgccagcgcgttcgccagcttgagcggcgtctgcccgccgagcgtgaccaccacgccgtcgggctgctcgacgtcgacgatgtccatgacgtcctcgaacgtaagcggctcgaagtacagcttgtcggacgtgtcgtagtcggtggacaccgtctcggggttgcagttcaccatgatcgtctcgaacccgacctcgtgcagagcgtagctggcgtgcacgcagcagtagtcgaactcgatgccctggccgatgcggttcggccccgcgcccaggatcatggcgcgccgccgcgtcttcggcgccgtctcggtctcgtcggcgtcgtaggtcttgtaatggtaggccgtggcgctggggaactcggcggcgcaggtgtccacggttttgaacgcgggcctcacgcccagcatcttgcggcacgtgcgcacggtgagctcgtcggagcccgtgaggcacgcgatctgcgcgtcggccagccccatgcgcttgagcaggcggaacgcgtcggcatcgagctcgtccagcgccatgccgcgcaggttttcctgcacgcgcacgatgtcggccatgcgcgcgacgaagaaggggtccacgcggctcgccgcgctcgcgcgctcgaccgtccagccgcggcgcagcgcctcggccaggtagaagatgcgctcggccgtggggcgcgccacgaggtcttccagcgcctcgtcggacgcgtcggcctcgccgcccttgccgtcggctcccaggcccgcgcgcccgttctccagcgagcgcatggccttgccgagcgattcctcgaacgttcggccgatggccatgacctcgccgacggccttcatgcgcgtggacagcgtgtcgtcggtgccctggaacttctcgaacgcgaagcgcggcaccttcaccacgcagtagtcgatggacggctcgaagcaggcgggcgtggccttcgtgatgtcgttcacgatctcgtcgagcgtgtagcccacggccagcttcgcggccgccttcgcgatggggaagcccgtggctttcgacgcgagcgccgaggagcgcgacacgcgagggttcatctctatgacgatcatgcggccgttctcggggttgacggcgaactgcacgttggagccgccggtctccacgccgatcttctcgaggatggccagcgacgccgcgcgcatgcgctggtactccacatccgtcagcgtctgcgcgggcgccaccgtgatggagtcgcccgtgtgcacgcccatggcgtcgaagttctcgatggagcacacgatgatgccgttgccggcgcggtcgcgcatgacctccatctcgtactctttccagccctcgatgctctcctccaccagcacctcgccggccggcgacagctccaggccctggcccacgatctcgtgcagctcggccgcgtcgtgcgcgatgccgccgcccgcgccgcccagcgtgaacgaggggcgcagcaccacggggtagccgagctcggccacgatgtcctcggcgtcggcgatggaataggcgtagccggagcgcgacgtctcgatgccaagcttcgccatgcactcgttgaactgcttgcggtcctcgccgcgctcgatagcctcgaggtcgcagccgatcatctccacgccgtacttggccaggatgccggcgcgcgcgagctcgacggccgtgttgagcccggtctggccgcccagcgtgggcaagagggcgtcggggcgctccttcgcaatgacctgctcgacgaactccacggtgatgggttcgacgtaggtgcggtcggccaggcccgggtcggtcatgatggtcgcggggttgctgttcacgagcaccacgcgatagccgtcggccttcaacaccttgcaggcctgcgcgcccgagtagtcgaactcgcacgcctgcccgatgacgatggggccgcttccgacgacgaggatggtttggatgtcttcgcgcttaggcatgggaggcctccttcacttcggcgaacgaccagccggccaggcgatcctcggcgatgtcgatgtcgaggtagtttgcacattcgcgcgggtcaggcaaggtcagcgagggcgcggctggtgccccagattgccctgatgcaaggctggactggacttccgtccgtccagccgcagcagaagtgcaagatggggtgccagccgcggccgcagcgtcggcaacgccgccgttcgccagaacggcggaatccatcaaccgtgcgaacgcagcgaacaggtaatgggcgtcggtaggacccggcgaggcttccgggtggtactgcaccgaaaacgcgggtatgtcgaggaacgcgacaccctcggccgtgccgtcgttgaggttcacgtgcgtgagctggatgcgtccgaagcgctcgttttgcaccaccggcgcgacgccgcggcgcgcccagcagcgcaggtcgtcctcgtgcgtgcagacgccggccgacagctccggcacgagcgcgcccaagctggggaacacgaggccgaagccgtggttctgcgcggtgatctccacgcggcgcgtgcgcaggttcatgacgggatggttgccgccgcggtggccgaacttgagcttctcgatatccgcgcccgccgccttggcgatcatctggtgccccaggcagatgccgaacacgggcaccttccccagcagttgctccacctgggcgtacgtgccctcgacggcctcggggtcgcccgggccgttcgacaggaacacgccgtcgggagccatggtcagcacctcggccgccggggtgtcccacggcacgcaggtcacgccgcagccggcgcgcacgaggttttcgaggatggagcgcttcgctccgcagtcgtaggcgaccactttgaagcgcggctcgggaggcgcggcgagcgcgaacgcctgcgaagccggcaggtcgtcggccaagaagcggcgcggacgcgcgcacgacaccgtggaggccaggttctgcccgacgatggatgcgctcgcgcgcactttcgccagaaggctggcctcgtccacgtcgacggtggacagcacggcccgttgtgcgccgcagtcgcgcacatggcgcacgagcgcgcgggtgtccaccccttcgacggccaccacgccgtggtcgcgcaggtagtcgggcaggccctgcgcgctgcgccagttcgacggcgtcgcgcacaggtcgcgcacgacgaggccgcgcagggcgggctcgtccgcctgcgcgtcgtccacgttcacgccgtagtttccgatctggggatacgtcatcgtcacgatctggcccgcgtacgacgggtcggtgatcacctcgaggtagccctcgagcgaggtgttgaagcagatctcgccgaacacctcccccgccgccgcgcacgacgtgccgcggaacacggcgccgtcctccaacacgagcgccgcgggcgcgcccgcgggcttcgacgtcccctgcaacaaccgcttcgaaatctcgctcaagcttccatccttccgttcgggcaacgcccctacaaaaaagcgcctccatctgatgtgggaggcgcacggatgcggggtgtatgttgcgcaccttgtcggtctctccgtaccgcccttaaaggtcgaagcgtagtatacgcctataacgagttttatcgattagaaatgcaatattttctactattcgagtatttttatgcatttataagaaacgataccgaaagacgcgcacagcttccgaccgtcggacgttctatcccgtcggcggccggcgcacgcgtgccgaagaagcggcgtgccgcgtgcgatccttcccgcaatgttgcgttttttcgaaccgtatcggcatgcatcgaaagtaatcattgcaaactgcctgatcatcgtctcgcgctcttccgcgtcgatgagaacgccccgtcaaacgcaacattcctgtgataatcgcacatcgaggccgcacctacggcggccggcctagtcgtagcctaccggaagcccgagctgccgccggagccgcagcttgcgagcatggtagtccgacacgcgcacttgcatgcgctttcccaggagtcgacgtatcgtgtcggctatcgcatcggttgcagccaggctgtccagctcgtcgttcgtgacgcctacgaccgtccagcccatcgccatcaacgcgttcgtccttctagaatccctgatacggctttcctccccttcgtgcatctccctgctttggtactccacgtcgagtttcgcatccggccagcaaaggtcgcaacgaaaactcgatctgccggaagtcgtgcgggctcctgcgattgccttcacctcgtaattcatcctcgggatgcccaagccgtacccgccgtacgatgtcggcaagcccaacacgagcgcctgcttcgtctccctcggagaagccgaaccatccgccaggtacggcaggacgcgcgccacgatccgagcgcccgcgatggaagggttgagcgaaacgaagctgcgtagagaacgcatcgtcatcaaaggaggcacctgatacgcaggagcagtcgacgttcgccgagtgcgataggttccgcaaagctcgtaagcaagttcaagcagatcgatcttgtttttcgctgacggagccgcctgaacgcaggcaaacggcgcactgcatacgccaacaccgtccgacagccggagcaaggacttcccacgcatctgccgtgtgcacacgtgcgacacgcgacgcgaagcggagcggcatcttgaagccgctcccaggagaatatggacgggacgctcgatcgataacccagggcgatcgttctcaatgcgcttgacgacctcttcgagctcccgcgcactcggcgcacgagcgggaagccgccacgccgtgtcgccagaccctgcaagctcccgcgcgtcgatcgccctcaacacctgaaaagccgtttgatgggagaagcaaacctgcataggttccattggagcctcctcgtctgccctgggctgcgaggatcttgcagacgtggtactaggaagcgagggcccggcttcctccatgggctgcttcaaaaaagaagagcgcctgcactggctcgataaggagatgattttatcacgcagtgcccgcccggatgcccgatatttcccgtaatgttgcgaaagaacgcgcatcaatcggacattctccagcagttgcgtttgcaaccagggaaaacgcgcaaaagcactcaggatcgcccttcttctacccccgcaacgcaacattgcaggaagaatcgggcatctggaaccgcagcgggcgacctgcgccgcctagtcggctcatcggagcgtttcttacgccccgcatggccatcgggcgcaccgggcatcgcgcagaacggccccgcatcgttcgctcgatgcggggccgcgtggttcgaagatcgtgcagggctcgaccctactcgacgatggcgccgtcctccatggtggcgtagccgcccacgtagacgtcggtggcgcggccggtcagctcggcgccgaggaagcccgagttcacggccttagactggaagtccgcggcgtccaccgtccaggcggcgtccgggtcgatgaccgtgaggtcggccgtcgcgcccggctcgagggccacgcgctcgacgcgcaggatctcgcggggacgcacggccatgagctcgacggcgcgctcccagctgatgacgcccggcgccaccaggttcgtgatgaccagcgaaagcgccgtctccaggccgatcatgccgaagggcgccagctcgaactcggcgttcttctcgaagtcgttgtgcggcgcgtggtcggtgacgatggcgtccaccgtgccgtccttcacgccctccaccagcgcggcagcgtcctcggccgtgcgcagcggcgggttcaccttgaggaaggtgttgtagtcgtcgccgatggcgtcctcggtgaggaacaggtggtgcggcgtgacctcgcaggtgaccggcaggccctcggccttggcggcgcgcaccaggtccaggccgcgcgccgtggtgaggtgctggatgtgcagcgggcagccggtgaggcggcagatggcgatgtcgcgggcgatctggatctcctcgccttcggccggccagcccagcatgcccaggcgcgtcgacacgacgccctcgttcacctggccggcgccgacgaggtcctcgtcctggcagtggctcatcaccacgcggtcgaactgcgcggcgtagtccatgacgcggcgcatcatgcccgcgccctgcaccccgcggccgtcgtcggtgaaggcgacggcgccgtgcgccaccatgtcgcccatctcggacagcgtgtcgcccttgagcccctgcgagcaggagccggccacgtgcacgcggcacttgcccacggccgccgcgcgagccttcacgtactccacgcccacggcgttgtcgatgacgggcttcgtgttcggcatgcagcacaccgccgtgaagccgccgtgcgccgcggcgcgcgtgccggaggcgatatcctccttcagctcgtagccgggctcgcgcagatgcacgtggatgtccacgaggccggggacgacgatcttcccgcccaggtcgcgctcgacgcccttctccatcgcaaggttctggccgatctcgacgatcttcccgtcgcgcacgaggatgtcggccgtttcgttcagaccgacctgcgggtcgatcacgtgggcgttcttaagcagtaaggccatcttcgctccctccgagcagcaggtacatttcggccatgcgggtcaggatgccggcatagacctgatcgagaatgaccgagcgcttcgggtggtcggccatgtagctatccagttcgacgccgcggttgatggggccggggtggcagatgagggcgtcgggcttcatgaggtgctcgcggtccttcgtgaggccgtacagcatgttgtactcgcgcagcgacgggtacggcgcgccctcgaggcgctcgcgctggatgcgcagcatgtacaccacgtcgaggtcgggcagcgcctcgtcgagcttcgtggtcacgtggtcggcgcccaggatgtcggggcgcgcgggcagcagcgtcggcggcgcgaccaccgtcacctcgcagcccatgatcttgagcgcggggatcaggctgccgcacacgcgggagtggccgatgtcgcccacgacgcccaccttgaggccgttcaggtcgcccttgacctcccagatggagtacaggtccagcagcgcctgcgtggggtgctggtgcttgccgtcgcctgcgtcgatgacgtgcgcgccggagacgtcggcgatcttgcggggcacgccggcgtgcttgtcgcgcacgatgatcatgtcgatcttgtaggcgcacagcgtctccaccgtgtccacgaggctctcgcccttcaccgtggaggtggagctgccgccgaagttcaggctgttggcgctcaggcgcttctcggcgatctcgaacgaggagcgcgtgcgggtggacggctcgttgaacatgttgaccacggtgacgcccttgagcgtgggcacctgcttgatgcggcgctcgttgacttccttgaagcggaccgccgtttccagaacggtcatgatgtcgtcggcggagtactccgtgatgtcgatcagatgcttgtgattgaaggccatgccctattcacctcccagcggtgccgaacccgcacgggagcccggagcgatttccagtatctcgacctcggacttgccgtccgtctcttccaagaacaggcgcacgttctcgtcggaggaagacgggacgttcttgcccacgaagtcggcgcggatgggcagctgacgatggccgcggtccacgaggacggccagctgcaccgtggagggacggccgatatccatgagcgcgtcgagcgcggcgcggatggtgcggccggtgtacagcacgtcgtcgacgagcacgacgtccttgccgtcgaggtcgaagaggatgtcggtggaatgcacctcgggcgagagatgcgtcgcgaagtcgtcgcgatagaagctgatgtcgagcttgccgagcggcaccttcgtgccctcgatggcctcgatcttctcggccaggcgcttggcgagcaagtcgccgcgcgtcacgatgccgacgagcgcgatgttgcccgcgcccttgttggtctcgaggatctgatgcgcgatgcgcgtcagcgaccgctcgatctcgtctgcgtccatgcagacggtcttgaccgttcctgcgtcgttcatacacaccctttcttgacgtcgagtgcgtacagacggacctgctctccgccgggtttcgcgcccgaccggcaatgccgggcgtccgcgtcgcccccgagttggcggcgtctgcgcgagggcatgaaaaaaagcctccgcgacagacaaaggcttcgactcgtcgcgctcttgttcgggtgagcgcttggggttctaccttgtcggtctctctgtaccgcttttaaaggactggaagcagtatattcggttcggagccgatttgtaaccccttttatgcagaaacttgcgagaatatgtataaggcgaggtcgcgcaagcgcctatgcggccgcctttcgacgaccgggcgggcgaaccttgcggcgcgcccgcccgacgatgaatatcggttacttcgcgagcttgcggcgcagcgcgaaggccacgactccggcggcggccagcatgccgaaggaggcgcccgccagcgcgccggcgtccatgccggtcttgggcgaggtcgcgcccgtgtcggcgccggacggcaacgcagccgacgtatcggcagcaggctcgtcgacgtccgccttcgaggggacgagcgtcatgacgaagtcggcgctgtaagaggcatcgccttcctggtcgccgaggttgagcatctcggacgtgaagttgaagctgctctggtcgacggccctcgtcacttcgaacgtcttggcgatgccggcgcttcccgcgctcggcttcacgtgcacctcgagcttgttgcaaccggcgtactggccgcccgcgagaagcgccacgccgaaatcgatcttcttggtcgcgttctcggcaacgaccctgaacgacggcatgccgtccagcgcgtcgtcggccgtctcgctcgtggcgatgacggcgaacgaagacgccctcgtctcgccagagaggacgcacgagccgtcttcgttcgacgcgctctcctgccacggcccgatcgagcgggctgcggccgactcctgcgcggtcgcctgatccgccgtcggctcagccgcctcgtcggcccacgcgagcgcggggagcgcgcacgcgagcatcgcagcgcacaaaagcgcggccagcttcttcttcatatcagcacctctctcgtcgatgcgcctacccgaaggcgcaagcattccacagccacctcatgctagagcatggagacatgccgttcgaccccttcgacgaaagaggctccgcctattgcgaaagcgggggcgcagctcacgcagcaggcttctcgcccacgagcacggccgtgacgatatagcgcaccgggtcgctggtcagggccgagcggcaggtgctgagctgcacgatgaggtcgtcggcatcgagctgcgcgccgtcgcgcacgttcgccttcgggtcgtcgggcgcgagcaccgatgcgaagtagcccgtccgcacggcggggtcggagaagtcgaacgagttgaggatgtgccggtcgtcgtactcgtaggccgccaccacctcgtaggcgaggatgcgatcaggcaggtaaacgtacagctcggggttgtcggcgaagaacgccgggtcctcgtaggcatgcaacgtggcgaacatcgcgtcgttcacgatgttgtggccgtacagcacggtgacgggatcggagaagtcggtcgcgttcgccatctgggaaaacaccgcgccttcgacggccggctcgccgtagcggtcgtgatcgaggtagaagaagtcgtctcccggccgctggagcacgggaaggttgacgttcgtgttcggcacgtagagccacgcgtagacgtcggggctctcccggcgcagcgcctcgaagtcgataggattctccgccggctcgtccgcaggcgcgtcgtaggcgcgctccaccgccggcagcggctcgcgctcgaccgcgcgcaccgcatcggccgcctgctgccgttgccaggcgagatagccgaaccccgccgccgccccggcgagcagcaccgccagcagcacgacgagcgccatcgcgcccggatcgcgccgtgcacgcccggaatgtctcaaaggaagccctttctcgctcgggcgcgcctacgcgccgcgcgccgtctgggcaattcaaaggcaaccggcgggcgcggtcaaggcgcacggcgaaaccgggcgcgtgcacggcgaaaccggatggatcgcccgcaggggccgatccccctaccccgtcacgcgctcggaacgcgacaggacgcggatacggccgtcgcggcagtgcgacgcgagggtgacgcccagctcctcggcgcggcgtacggcctcgtcggtagccgacttgcggctgaccagcaccgggcaaccggcacgataagccttgagggccatctcgcagctgatgcgccccgtgatgaacagcgccttgtcgcgcacgtccacacggtcgagccacgcctgccctaccagcttgtccatggcgttgtgccgcccgatgtcctcgcgcaccagcagcagctcgtccgagcccgccgcgcccagcccgcagccgtgcacgcacgcgccggtgttgcggcgcgggctgcgctcgcacagctcctccatgcacgccagcaagtcgtcggcgtcgaagcgcgccgccgtctccaacgcgcggggctcgcccgcgcgccgcgcgtcgcgcagaagcgccgactgggcgcacccggccgacgtgacgcggtgcaggggcacgtaaccttcctccgcccgctctccgctggccacgtacaccgcagcctcctcgggcacctcgaccacctccacaaggctgtcgcgatcggcgatgaggccctcggacaacaggtagcccaccgccagctcggacagcccgaaggggcttccctggctcacggccacaggcacctcgttcaggaagatgcggatgggccgctcggccgactcgcgcttcgcgggctcgggacgctctacgatggccatcgtcctacctctgcgcttccgcggcggcatcggcggccgcgcgctggtacgccacgaggtcgagcttcgccatgaccacgtcctccacttcgaacgagaacggcgcaagcgcgtcctcctcgtacacggtgcgcgtgtagccgccgcattcgtcgcaggtggccaggcggtgcgcctcgtcgccctcgagattgaaataatgcagacggctctggttctgcgtgccgcagcgcacgcaacgcacgcgctcgaactcccacgcgcagccgcactgggcgcaccacaggcgcttggcgcgtccctgccccgcaggcgcgccgctcacctgcgccaccgcagcttcgccgccgcacacggggcagcgcacgctatgcggctcgtcggcacccgcctcccgacgcgcccgctcgacggccgtcgccggaccctctagaaacgcgcgcagggccagcgccgccgccatcgcgccgatgcgggccgcgtcctcgtccatgccgtcgtcctcgagcagctcgacgaacgactccacataggcagccgggttgcagccggcgagcgcgaggtcgcttgcggcgaccatgcgctcccagctcgtgcgcgagagcgcctcgctcgtcgacgccgcgaacccgccgcgcgcagccagcacttcggccagccgctccatcgcgcccgccaacgcggcggcctcgatcttcaccggagcatgggagagcaccggctccccgtggcgcgcccacgttttcaggctatcggcgtcgggcacttcgtagccgagatcaacatgggaggccgcctcggcctgaaccccccacagctcgcggaagaacgcgagccgcgagacgtcgccctcgtcgaggttcgtacggtacgcggcgatggccgcatcgatcgctttgaggttcatggattcctttcctatctgaacgggcggaacgccctttttgtcatcctgagcgcaggccggagtcgaaggatcccgcgcggcgatagccgcggcgcttccagctggcgccgcgcgggatccttcgactccgcgcttcgcgctccgctcaggatgacaacccgggagcgtccggtcgggttacccacccggcgcccgtgccgccgcgattcgcggcggcacgaacgggtcgccgcgcttttacttcgtcttctccaccacgttctcgcccgtggcgatctccttgcgggcccagtggccccagtggtacagggcgtcggactcggacaccgtgccgtcgccgaacatgagcttcgccgtgccgcggtacggctggaagatgccggcgcccaggaagatgtgcgccaggccgaacaccgcgatcagcagaaagcctatgtcgtgcaggaacagggtcacgccgtgcacgcccgcaccgaaatcgaacagcgtcgtgcccagcagaaggatgatgcccgtgatgcccatgagcgctccggcgaaccacagcatgccgtcggcgaaacgctggccgctcttgacctcgcgctggtcgggcatgtggatccacttggccatgaacaggtacgggaagaacagcatcatccacttcttgtcgtcggaatcccaacgatcgaacaggttcttgaagatgtgcgccacgcccttcggagccagcagggcgctgatcagtggcaccgcgacgaacacgacgccgatgatgcgatgcgacatgcggatggcgaacaccgtgtccgcgccgacagcggccgcgagggccggaacgaacacgaacaggccggagatgcacagcaggatgcacgccgcgatggtgatgccgtgcgtcaagcgcgcctgcagcgagtggcgcttgatgtagcgttccttgccgctggctgccatgcttgccaagaacgcctggttcttggcggcttcctcagcggaaaccttgacgggtcccttgctcatcggttgcctcccttcttgcccggaaggttctcggtgatatgctccatcaccgtctcctcgtcctggccgtcgccgtgcttgacgacctctccggtgtcgacggagatcgtgtcgtccgtctcggggttgtacgccagcttgtcgcgcttgtagccgatgcccagcacgaacatggccgccaagccggcaaccgtgaggcccgtgacggcgcccgtgaccggcttcatgatctgggtcaggccgaccatcgggttgacctgcgggtcgacgacctggccgtgcgcttccacgccgtgcttcagcacctggatcacgtgaaggccgcccacctcgtcctcaccgtacaaggcggcgtccgcatagcccttgccgtgcaggtagtccacgcgttcccgggcgatggaaagcatctcctcgcgatcgccgaacatgagcgcctgcggttgacaggtggtcacgcacgccggagccaggccctgctcgacgcggtcgaggcatccggtgcacttgttgatcttgctcgtgtcgccgtggtattgcggcacgtcgaacgggcaggccgtggagcagtacctgcagccgatgcacttggactcgtccacgctgacgaaaccggtggcctcatccttcttcagcgccccgccaggacagatggtggcgcagggggcgtcggtgcagtgctggcacgagcggcgcccgaaggcccacttcacgcccttgtcgccaccggcctcctcatggaagctgatcagcaggcgcgtgtcgccgttcaaatccatcgggctttggtacgagcccgtggaagggttcccgttcttctcgagagtggacggcaggccgttccagcacttgcaggccacctggcagccgcggcacgcggtgcagcgggaggagtcgaacaatatggctttctcactcatagctcacccctcctatgccttctcgatgtcgacgaggaacgccttgtactcgggcacccagcagttcgggtcgcccacgttcggcggcaggtcgttgacgatgtctccggtggcgaagtcgcccgcccagccgaagtggtgcgtcatgcccacctggtgcacggtctcgccgttcaccttgaacggcttaaagcgaggcgtgaccagcgccatgacctcgaccgacccgcggttgttgaacacgcggacgcgctcgccgttctcgatgcccttttcggccgccagttccaccgacatctcgacgaactgctcgggcatggcctcgttgagggccgggcacgtgcgggtctggccgccggtctgccaatgctcggtgaccgaataggtggtcaccgcgatggggtactggctgcggtcgccgcgcttgaccgactcgaactcggcgaagcgcacgcacggcgagttctgccgtccgttcagcttgttgtccgccgggctctcgaagggctcgtagtgctcgggcaaaggaccgtcgcccatgccgtagctctccaggcgcgcgttctgctcccacagcatcatgaacgccttgttgttgggcggcacgggcgtgccgttcgacacggccacgaagtcgccgacgtcgttctgcacccacttctcgcccgtccattcgaccagcacccggttcgggttccagggcttgccttccagatccgccgaggcgcggttgtagatgatgcgacggttgagcggccaagcgaacgaccacttgggatgcaggcccagccccgtcgggtcgtcggcgacgcggctgccgatggcctgctcggccgggtcgagcggagcgtcgttgttggcccagaagccggtgtagatccacatgccgcaggccgtggagccgtcggccttgaggttcgcgaacgtgctcagcaaatcgggcgcgccgttctcgaagccgccctcggcgtagttgtagccgttgagggcccaggccacggggcgcgggtcgatcttgccgtcaacgtagtagtcccacttcgtgttgacgacgggctcgggagccacaccgtcttccttcttgtacaggtcgacgatggccttccacaacacgtcgcagatctcgtagtcgggcttggcgtcttcccacggctcgacggcctggtagcgccactgcagccagcggccagagttcaggatggtgcccggcttctcgtagatcagcgccgcgggcaggaagtacaccgtggtgtcgatgtcggcggcgttcatgtcgggggccttccagaaggtggcggactccgtctccacccagtcggccaccacgagccagtcgaggttcgccatggcgcggcgcacgttgctcgcgttcggcgccgagtggcaggggttcatgccccagttgaagtagcccttgatgataccctggctcatcagctcgaacgagccgatgatggagtagtcggggctcttcggcaccttcggccaccagtcgtagccgtagtcgttctccaccgtggccgcgtcgccgaaccattccttcagcgcggagacgatgaacttcggcttgttggtgtagtaaccgtccgcgtacgtctccttctcgcaccatttgcgcagagacggcgtgccgtactcggtgggccagttcaggtagccgggctggttcgccacgagcatgcccatgtcggtggcgccctgcacgttcggctcgccgcgcagcgcgttcacgccgccgccggccacgccgacgttgcccagcagaagctgcaggatgcccatggagcggcagttctgcgcgccgtaggtgtgctgcgtctggccgagtgcgtacaggatggtaccggacttgtcgggagcgccggtggccgcgtaggtggcgtacaccttctccaaaagctccttgtccatgccgcacgtggcggacacggtgtccaggtcgtagcgtgaatagtgcttcttcatctgctggaacacgcacatcgggtcctgcagggtcatgtcgcgcttcggcacttcgacggtgggaggcgtgaactcgggcacgccctcggccttggcccaggcgtaggcgccgccctccgaggtgtcccactccttcgtagactccacctggtagtgccaggtcttcgcgtcgtaggtggcgctgtccttgtcgaagcccgagaagatgcccgtctccacgtcgaaggagtactcctcgtccaacaggtaggacgcgttcgtgtagttcagcacgtactcgtgctgccacaggtcatgctcgagaatgtagttaaacagaccgccgtagaaagcgatgtcggtgcccgagcggataggacagtagatgtccgccatctcggccgagcgcgtgtagcgcggatcgacgacgatccacgtggcgccgttgtcaagcgccctctgcacccacttcgacgaaacggggtggttctcgacgttgttggagccgatcgtcaagatgacgtcggcgttctgcatgtcgcaatagtggttcgtcatcgaaccgcgaccgaatgttgctgccagaccggcaaccgtggggctgtgtcaaacacgagcctggttgtcgatggctatcacccctagcgaccgcatcatcttgttgatgaggtactcttcctcggagttctgctggctgccgcccaagctggcgatgccgtggcaacggttgaccgtgatgccgttggacaccgtctcgaacgtggcgtcgcgcgtgtccttgacccaacgcgcgatctcggcgacggcgtcgtcccaggtgatatcctcccactcggaggcgccggggcgtcgaaccatcggacgggtcctgcggttcgggttcttgatcacctcgcgcgtggcgggatccaccacgttgcgcagctggaacatcgtggcgcccttcgggcacaggccgccctggttgaccggatggtcggggtcgccttcgatgttgatcagctcgccgtcgcgggtggagcagatcacgccgcaaccgccggagcagtagcagcagatgttcgtgtactcctccgtgttcacgagcttccagtcggctgcgggctcgaccgccagcgcctccgactgtgaggacagctcgaacgccatggtagtggcgaacgctgcgccggcggctttgaaaaagcccctgcgtgacagattcatgtcctcgttctccttccttcttgtcttctcgtcccttgagaacctcatgcgcccgaaaccagcgggagaacgtcgcctagggcatggggagacgtcgtcctgctcgtggtaccggtacatgcatgccgtggccgagtcggcagccctccaccgctcgaccgccgcaatcctaacaagcaccatcggatgcgacatcatcagtttctgatgaggcgacccgttttatgcgcaaagtcccgtgatctattcgagaatattcggtaaacgtcatacttccccttgaagaggcaaaacgaacggtcgctttccggctgcgaacggcataggcggttccggcgaacggccagcgcgatccgggtacggcaccgaaggtgggatgcatgacgccttggaggcgggacgaacggccgacgggacggactgctatactgcgagaaacgaccgattcgtcgcatgcgaaaggagtcccatgagcgagacagagcgcattcgtctcacccgccttaccgagaagggcggttgagcggcgaagtggggtccgggagacctcgaagagatactgaaggacatcgcgccgccgcccgacgcagatttgctgctgggcttcgacacgtccgacgacgccgccgtctaccgtctgaacgacgacacggccgcggtgctgacgctcgatttcttcaccccggtggtggacgacccctacgagttcggcgccatcgccgcggcgaatgcgctgtccgacgtgttcgccatgggggcgaagcctctgacggcgctcaacatcctcgcgttcccgtgcagcctgggcaccgacgtggtggccgacgtgctgcgcggcggcgccgacaaggtgcgcgaggcgggcgcgttcgtggtgggcggccactccatcgaggacgacgagccgaagtacggcctgtcggtgttcggcaccgtgcaccccgactgcatcgtgcgcaacggcggcgcacagccgggcgacgcgctgttctacacgaaggtcctcggctcggggatcatgaactcggcgttccgggccggcttcgaagacgacgagggcatgcgccccgtcatcgcgtccatgatggagctcaacaaggcgggctccgaggcgatggcggccgcgcacgtgcacgccgccaccgacgtgacgggcttcgggttggccgggcacctccacgagatgctggacgcctcggacgcgtcggccgagctcgtctgggacgacctgccgctgttcgagggcgtctaccggtattcctgcgacttctgccgccccgccaagacgttcggcatcatcgactgggcgcgcgccttcgtgaggcagggcggcctcggagacgaggagttcgagaaccgcatgggcgtgctgtgcgacccgcagacgtccggcggcctgctggtggccgtggcgcccgacgaggccgacgagttcgcgcgcgcgttcgaagcggccgccggtcgcgcgcccgcgctgatcggccatgttcgcgacggcgcggcgggcgagatcagcatgaagtagggccgcatcgccccgaagggggcgatgcggccggcggacgttgcacgggaaaggctatgtccttaacttatgcgcaccttcgccattgaaaaccccgggaaagcgccatgttcgcgacttatgcgcacctgccgagacgtcgaacggacgaaagtacgcctcggttaatttccgacctgcgtttttaaagcacgtagcacgcgaaggcgacgcaaacgggcgattcggcatggcggaagcgcacataagtcgaggacatgggcgaaatggaccgattccgcggcagaaagccgacgcggctcaacttcggcgcccctccccttccgcggccagcagcgcggctcccacggcgcctgcgaaacgcgcgcgggactcggtggccacgggctcgcccaagcgcgcgccgaggcgctcgacgaagtacccgttgtcgcacaggccgcccgtcaggaagtagggcgcgcctttgccctgcgcgacgagcaccgacacccgctccaccaccgattcgatcacggcgtacgcgatgtcctcgcgcggcgttcccttgccgatgaggctgatgacctccgattccgcgaacaccgtgcacatggacgagatggacgtgggcgcgcccgcccgcgcgaggcgcgcgagctcctcctggctgacgccgaggcggttcgccatgacctcgaggaacttccccgtgccggccgagcacttgtcgttcatcgcgaacttgaccaccttgccgccgcgcagcacgatgaccttcgtgtcctggccgcccacgtcgaccacggtgcccccgccgccgaacaggaaaccggcgcccttgccgtggcaggtgatctcggtgaccacgcgatccgcataggggaccgcgacgcgtccgtagcccgtcgcgacgcagggaagcctgcgcgggtcgaagccgcgcgcgagcaactgctgggccaggcgctcggccgcgtccacgctgctgaaccccgtagggcacacaagcgtctcggcgagccggccgttttcgaacaccgccgccttcgcggccgtgcttcctacgtcgatgccgatcgagggcataggctaggtcctttcatcttttcttggcgcggaggggtgcctagtacaattccacctcgtgcacggcctcgtatgccaggccgccgctctcgaaggcgtccagcagcgcgtcccgctcctcggcagggacgcaccaggccaggccgcaacctgcggaaacctcggatggaatggggatcatcctgcctgggaggcccgtctcgcgggcggcggcctcgacggccatcgcgtcgctcgtggacgcgaaggtcaccacggctttcggcgtcttcctccgcacggctcaggccccctcggcgatggcggccacggcggcgatgccggcgtccacctcgtcctcggtgttgaagctgctgaagctgaaccgcacggcgccctggctctgcgtgcccagcgcctcgtgcatgagcggcgcacaatgggcgccggcgcgcgtgcagatgccgaattcggcattgagcgcgtcgccgatcgccgcggagtccgcatctcccacgttgagcgcgacgatgccgcaacgccccgcgtcgccgcccccgcccagcacgcgcacgccgtcgatgccgcgcacgccgcgctcgaagcgctcggccaacgcgcgcacctgcgcgcccagctcctccacgccgcgctcctcgatataggccagccccgcgctcaagccggcgatgccgtgggcgttcagcgtgcccgcctccaggcgctcgggcatgcgcgcgggatgatgccggtcgtagctgtgcgtacccgaaccgcccaccttcagcggctcgatctccacgccttccgccacggcgaggccgcccgtgccctgggggccgtacaggctcttgtgcccggtgaacgccacgacgtccagcccatcgcgccccatgtcgatgggcacgacgcccgccgtctgggccgcgtccgccaccagcagcgcgccgcgctcgcggcacaggcgcgcgatgcgggcgatgtcgtacacgtcgccggtgaggttggaagcatgggtcaccgccgccagccgcgctcccggaagcgccgcctccaacgcgtcgtagtcgagcgcgccgcgcgcgtcgtggggcaccacgaccacctcgcaaccgcgctcgtccgccagacggtacagcgggcgcagcaccgaattgtgcgaggcggccgtggtcaccagcttgtctcccggccgcgcgagcccggcgatggcggtgttcagcgcctcggtggcgttgctggcgaaggatacgcacgacggatcggccgcaccgaacagccgagccagctgctggcgcgcccggaacacggcatagcccgcgtcgagcgacgcctcgtgcacaccgcggcccacgcccccgaagctgttgacggcccgcgccaccgcctcggccacctcgggcggcttgacggcggtggtggccgcgttgtcgaagtagatcatagctccacgatccttacgtctcggcccggccctacgggcggatgatgccgcgcgcgctcgcctgcttctccacgatcacgtacatgttcgtggcctcgcccacttccagctgctcggccagcccgtaatggttcaggcacgtgccgcagctcatgatctcgacgccggcctcggcgagcgtgcgcaggtcgtcgagcgacgaggagcccgtgcaggcgagcttcacgccgccgttgtacatgagcaccgtctccggcagctcgtcgagctgcgtcagggcgaacacgaagcccttcatcagcacggctcccagctcgtcgtcccccgagcccatgaactcggacgggatcaccgccacccggccgcccgtcggggccggatcgaccgccgggcagctcgcggcgcttcccgcctggccgtccgacgccgccgcgcccttcgagaaggtcaccgcgaacgcatcttcgccgcgcttctcgccgacggcttccaccttgagcgtcttcgccagcacctccagattgtgcaccgcggtctcgttgtcaacgagcacttcgagcacgccctcccccatggccgagagcgccttcttggcgcgcaccacgggaagcgggcacgcctgaccccgtgcgtcgatctgctccatcgtcttccttctttctcatcgtcggttgtcatcccgcacggcgacggccgtggcgcttccagctggcgcctcacgggatccttcgactccgcgctgcgcgctgcgctcaggatgaaagcatgcacggcctccgcaccgcctgcaggacgacagcctaccgcggtcgttctccttcagcaaaatatgtcgcgccgcgcgttcagctggcgcggcagccgggctacgccctcgatcgggacgccctcctcctgcgcaaggcgctccagcagctccacgtcgtcgcacgacgcgagcaacgacaccccgcaggaagcgcgcgcggcgcggggcgtgggcgagatcctcgccttggcccccgcgtcgcgcgccagctcgtacagacgccagccgtcggtatggctcgagaacaggatatagcaatcctcgggacgtgcgtccttgttcacggtatcggcagcgtcttgttgcatggccttacgcgtccagcatctcgatgaacgcgccgatgcgcgtgcgcagctgctcggcgtcgttgtcggcgtagtcggtctcgaggcccaggcacgggatgccctcctcggcaagcgcgtccgccagcggcgccttttccacgtcgtagagcgtgcagaacttgaggttcgcgtcgatcacgccgtcgaccttgtactccttcgccatgcgcaccacgtccgcgacgcgacccgggttcggcgtgaagcacgcgcagttgttcttcatatagcgctgcgccaacgcctggaacatgccgtcgagcgtgccctcgccctcgtccacctcgttctcgaagtagcgcgtgcccgtgcacatctcctcgcacaccaccacggcgccgctcgtctcgacgatatggtgcagcttccagttcgggatggccagcggcgtgcccgtgatcaggatgcgcttcgtgccggcgggcaccacgccctcgccgcgctcgatgcgcgcttccagctcgtcggccagcttgttcgccgtctcggcgcagcgcaccgggtcgtcgaagaacgcgatctgcatcatgagcagggcgtccttgccgctgatgggcaccgggtctgccttgcgcgcctcgaacacgcgggccagcgcgcgacgcttctcgttgatggtgcgaatggcacgggcaaggttctcggccgtcagttcgttgcccgtctcggcctccacctccttggcgaacagcgcgatctcgtctttccacgccgcgatgtccttctcgcgcttcatctgcggcacgtccatgacgtaggtcttcttgtcggcccccaggatctcgtaggccttcttcttgccgtcgcacgtggtctcgcccacatacatgtcggccacgctgaagtacggacacgtcttgccgaagtgcgcgccgagcgacgccttgatcagcgggcagatgccgctgggcagcaccttctcgccttcgggcacccagaactgcgagccgccgcacagccccgtgacggcgccgccgcaggcgacgaccacctcgtcgggcacgaacacgcagaacgtgccgaacaccttgccgccctgcttttgcagctcgatgagctccgcggggcgcacgccgtggatctccgacaccacgaagtcgtagaacgccatgttctcagggcggttctcctgcgtgaggtacgtgtcgccgaacgccatcggcagcacggcgcacagctggtcgtgcgtctccagatccatgcccaagtctttccacattgcctgatagtcagccatgaaggcccccttcgataccagtcgatagcaaagttgcgatgttattcggttgtcgttgcagaaatgacggtgcagcgtcgccggatgcgcgcatgcgcatgcgggacgcgatgaggtgcgcgatgatgaagcgtcgccttgcatgcagaaatggcacccgcgcagaatcgtgccaatgcgaggcgacgaggtaatgataccgtatcgcagccgcccgccgcaatcgcagggcagcttatcggcgaaaggccggcggaaaagcccctaccgatcgacgtccttcttccggtacacgaaccagtacgccatgccgacggcgacgccgccggcgacgttgcccagcgtggcggccgacaggttcgtcgcgatgccggccagcgtcaccgcgtcgggcgcacccacccccatcgagttgagcaacagccccatggggaggaagaacatgttcgccacgcagtgctcgaacccgcacgcaacgaacgcagagatgggcagcaggatgccgagcaccttgtcggcgacggtgcgcgccgagaacccgatccacacggccaggcacacgaggatgttgcacatgacgcccttgaagaacagcgtcgtccaatcgggcgccaccttgcccgcggccacgctgacgaaggcctcgcccaccgcgcctccgttcatggcggcgacgttcgcaaagtggacgagcgcgagcgcgacgagcgcgccggcgaggttgccgagccacacgagcagccagttgccgaacagggacctccagccgatacggcccgacgctttcgcgcacaccagaagcacgttgccggtgaacagctccgcgccgcagcacagcacgagcaccagcccgaggcagaagcagagtccgcccaccgcgcgctgcaccgcgaacggcatggaggggtcgcccaggaacacgcagaagtacagcgccccgaacgcgatgaacgccccggccagcatcgcggacgcgaagcacttcgccttcggcatggccgccttggcctcgccgaccttctcggccttctccgcgatttcagccggcgacagcgcatccggcctgagcgtttggatctcgtcctgcatcatgatcgcatctggttccttccttgcctggtcgcggcttcttcgcgcgtcccctgcgaagccgcacggtatggtaccgcaactcacgggcgcagggagaaacaaaagcgttttcctcgacaatttccccatctcgtcgtcctgctcgtcgcatcgccgaatcgatacccggccgtcggtgcatcggcgcgcgcaacactggtatactttggcgagcggccgcgtcggccgcgcatccccgcacccgtgttcgagaaaggcgtttccatggcgaatccgtcacgcaccgatctgctccgcgcgctcccgcaggtggaggagatgctccagctgcccgaggtgagcgcgcttctgtcgctcctcccccgcagcgtgctggccgattgcgtgcgcgaggccgtcgacgagacgcgtcgagccgtgcttgcaggagcatgcgaacgggtcgacgttccggcgctcgccgaatcgacgcgcgcccgggcgttcgcccgggcgcgcccgtcgctgcgccgcgtgatcaacgccacgggcatcgtcgtgcacacgaacctcgggcgcagcccgcttgccgacgaggccgtgagcgccgtgagcgacgtggcgcgcggctactccacgctggagtacgacaccgatgccatggcgcgcggcagccgccacgaccatgtggagcgcctcatctgcacgctcaccggcgccgaggcggcgctggccgtgaacaacaacgcggcggcggtcatgatggtgctccacgagttcgcgcgcgggcacgaagccgtggtgtcgcgcggcgagctggtggagatcggcggatcgttccgcgtgcccgacatcatggagctgtcgcaggcgcgcatggtggaggtgggcaccacgaacaagacgcatgccgtcgactacgagcgcgccatcggcgccgacacctcgatgctgttgaaggtgcatccttcgaactaccgcgtggtgggcttcgccgagagcgtgtcggcgcgcgacctgcgcccgctggccgatgccgagaacgcacggcgcacggcatccggcgagccgggcgcgggcgagcttctggtgtacgaggaccagggatcgggcgccttcctgaacctcgatgcgttcggcgcgtacgccgagcccaccgtggccgagtcgctgcaggcgggctgcgacctcgtgtcgttctcgggcgacaagctgctgggcggcccgcaggcgggcatcatcgtgggagcgaaacggttcatcgaccggctgaagaagaacccttacgcccgcgcgatgcgcctcgacaagatgacgctggccgcgctggaggccacgctgcgcctctacctcgaccccgcgatcgcgctcgagcgcatccctgcgctgcgcatgctgtccgagccggccgaagccgtgcgcgggcgcgccgagcggctggcgcgcaccttggaggaagcgcttcccgcaggggcggcgcgcatcgacgtggtaccggataccgcgcgggccggcggcggcgcgctgccgttgtgcgacatcgactcgcatgcggtgcgcatcgagttttcgcgcggggacgcgcaggggtgcgagacgttcctcattgcgcggcgcgacgtgcccgtgatcgggcgcatcaagcacgacgccgtgctgctggacgcgcgcaccgtggccgaggacgagctagccgaggtcgccgaggccgtgcgcgcctacttcgacgcgctcgacgccggagccgaggggagccgcgcatgagcgggcgcacgcagaccgacctcgtgctgggcacggccggccatatcgaccacggcaagtcgtcgctcgtgctggccttgaccggaaccgaccccgaccgtctggcagaggagaagcagcgcggcatcaccatcgagctgggcttcgcgcgcctggcgcttcccgacggcaccgtgctcggcgtggtggacgtgccgggccacgagcgcttcgtgcgccagatgatcgcgggatcgacgggcatcgacctggcgcttctttgcatcgccgccgacgacggcatcatgccgcagaccgaggagcacctggccgtgctggagcttctgggcatacgcacctgtgtggcggcgctcacgaaaaccgacctcgtggacgaggaatgggcgctgttcatggccgatgaggtgcggggccgcctggccggcacgcctttcgcggatgccgatatcgtccccgtgtccagccgcacgggcgccgggcttcccgagctgcaagaggctctgacacgcgcggcgcgcaccacgcggcgcgcgaaggcgggctcgcgcctgcgcctgcccgtcgaccgcgtgttcagcatcaaaggcgccgggaccgtggtcacgggcaccctgtggagcgggtcggcccggatgggcgacgaggtggaggtgctgccctccggcctgcgcacgcgcgtgcgcagcgtgcaggtgcacggcgagcccgtcgatcgcgccgacgccgggcaccgcgtcgccctcaacctgaacgccgtgtccaccgacgaggttcgaccgggcgatttcctggccgcgcccggtgcggcgagcgccaccgaccgcttcgacgcccaccttgcgttcctcggcgtgccaggcaagggcaagccgctcgtcagcggcgcgcgcgtgcacgtggcgcacggcacgcgcgaggtcaccggccgcgtgctgctcatggacggacggccgtcgctcggcgtcggcgagcgcgcctacgcgcagatccgcctcgacgagccgctgcccgtagcatggcgcgaccgcttcgtcgtgcgctcgtactcgcccgtgcacgtcgtcggcggcggcgaggtgctgcgcgcccgcccccgccgcaccaccacgctggcaccgggcgcgctcgagctgctggacgcgctgcgcgaaggcgacgaggccgccgtggcgcacgccgcgttcgcgctgaccgccgcgcccgtaacggccaccgagctggcgacgctttccgggctcgaggaggacgcggccgcccgcgagctcgagacccttgccgcgcacggcgctgcggtgcgcctcggcggcgagcgcgcgctgcgctacgccgccccctccgtgctgcagaagcagcgcgccgccatcgagaacgccctgctgaagttccatgccgagaacccggccgccaccggcatcgcgaaggacgcgctgcgccggcgctgcctgccgcgcgcggacgcgggctgcttcgacgcgctgctggacgacgcggtcgcgcgcggcgccgcggtgacggacgggggcgaggtgagccatcccaaagccggagcaggcgcgcgcaagctggaggagcaggccgccgagcagctgcgcgagacgctggccgccgcagccggggcgccgccgtccacaggcgagctcatcgcatcgagcggcctagactcctcgctcgtccaccgcgcgctgggaagtctggagaagcagggcctcgtacggcgcatcggagccgacttctacttcgacgtatcggcgctggccgccttcgagcaagccgtgcgcgcccgtctggttgacggccccgccaccgcagccgagctcaaggacgcgatgggcaccagcaggaagtacgccatccccctgctcgagtacttcgactcccaagccgtcactcgccgcgaaggcgacacgagggtgccgggaggaagatgacgccccgagggaggttctatccgggaatacgaaaagcgccccgatcggggcgcttgcgtttctggcggagatgtgtgcgaatcgaacacacccgagacgttctgcacgcctcacagcggctttgaaggccgtggagcccaccaggacccatccatctccaataagaaggtgccgtttcggcaccgtagatatgatagcgcatttgtccgcgacgaggacgcgcgttccgaaatgttgcgtatcgttcagcaattccccaaaagtacgtcgctcaggtggcgacgcgccacatccgccagcgcatggagcgcggacacgggggttggaggccggtcgagcatccgatggcacgggaagaagcgcgtgagatggtacgggatggcgggatcgagcgatgccagccaagccgctgccgcatcgatttcgtcgggatcgtcgttgagcccggggatgacgagcgtcgtcacctcgaggtggcacgtcggatcggccgccagcgtttcgatggtgcgcttgaccgcggacaggtcgccgcccgccgtatcgtagaatccctgcgtgaaccccttgaggtcgatgtttgccgcgtccacgatgccgaggagctcggtaagcggctcttcgttcaccatcccgttgctcaccagcacgttcgcaagccccgcctcgctcgcgagccgtccgacgtcccgcacgtactcgtaacccacgagcggttcgttgtacgtgtacgcgacgcctacgcatccgcgatcgcgggcccgcagcgccaggccgaccgcctcttcgggcgccacgtagcgccatgccgcatcctccgcgcccgcgcaggcgatatccgcgttctggcagaacggacagcgcaggttgcacccgtagcttcccagcgacagcacggtcgagcccgggcggaaccgcgcgagcggcttcttctccaccggatcgagcgcgatcgaggtcacgcgcccgtaattctcgtcgacgacccgtccaccgtaggcaacgcgcgccctgcacagcccgcgccgtccttcggaaagcgcgcaggcgtgcgggcacacgccgcacacggcgcgcccgtcagccacggcgcggctctcccccgcgttcgtggcgcaccacctcgaagcgctccagctccacgtcgtcgtcgaacaggtcgatgccggcctttcgcttcgcgatgtccacctgctgctgcgccgagtccacgccgtcgaggttcggcagcagcagcccccgcttccagcctttcgtcacgatcacaccgtagcgggccgggtccagctggtcgatcgactcgacgggcatgggcgtgaacagcacatccaccgaatacgacagcgcgtccaactcgtcggggcgcacgggcgggaagcgcggatcctccgaagccgccgccacgccgttgcgcacgatctcggcggccgtgctgcccgtcaccggcgagatggtgccgatacagccgcgcagctcgccgtgttcgtgcagcgacacgaacacgccggcgcgcttgtccgacagctcgggcggcaggccgtcgggcaccgctatggggttgcccgtgcgcacgaacccttcgacgctggcgcgggcaagcgcaacgtacgggtcgaccggcgcatcgttcgcggctgcgtcgcgcgcaccgctgcgatcctcatcgcggtcaaccgcggtccgcacggcgccgtcgccggccgagccctgcacctcgaacgcggccaccgcgtaacccacgccgaaggggccttcgtagctgagcagctcgtgcgagatgggaaggccttccaacgcgcccgccatgatccagaacgagcgcaggccgcattccgccgcctcctcgccgaacgtctcgtctatctccagcagaccgctcaaatcgcccgcatcgaacagcgcggtgaccatacggtcgaacacggggccctgcggagcgtagccgtacgggccgtcgctcgcaagcttatgggacaagtcgccgctggcgatgaggacgcagctgcgatccagatcggcggccgcctcggcgatgcagcgccccagcgcgaggtgcgtctggggcgagaggcccgacagcccgatgcgcaccacctggtacgtcgaatatgcctcgttcacgaaatgcagcggcacgatggtggcatggtcgagatccttcccgcccatgccgctgccgcacagcggcaccgtgtgcttgcgcgcgcacgcggctatggcggccgtcatctcgccgtcgtattgcacggtcatggaagagtcccatgcgccgaagcgccccatgtcgccgcggtcgaagtcgcccgtggacagatggaagcagtcgcggaacagcggggcgtggggcgacaccacgacgactgtctcgggcgcgtgggcagcgatgcggcgcgccacctcgcgatacgcgtcgagggtgtcctggatggcgcgctcctggccccggcctacctcgggcatggcgaggggcggatgcggcacggcgtacgcggcgacgattcccatgagagctccttcccgcaagcttcgaccgggcgctcgaacgttcgaacgtgtgcgcccttcaatggttcgattgtacaccctgcgaacagccgctcctgtcctttaccgccgcatgcgcccattcgatacgcaagcgttgacggacgcgcgcatcgccgcgcttaccgatcggctcgagcggcgtcgttcacatccatggtcatggtctggaagcggtgctccatgtaggcgttgtcgaaatgcttcgcgtaaaactcctcgatgggcgtgtcgggcgccttgcccgccgatcgcgcgtaccagcagtcgatggactgcacggtcatgacgccgtccaccagcatgagccccgcgcatacggccgtcaccgcgtagcgccagttccacggaatgaggttgatcaacttcaaaagccgcggcagcagaagcttgatccacgccacgcccagcacgccccacatcaccatgaacacgaagttcgtgcgtccgtcgatggacaagaacgtgcccgaatagtcccatgcgcggatgccgaacgagaactccatgatccagctcgtgaaatactcgaacgcaccgccgatgacggcgctcacgaggaagaccacccacacgggcttgtcgtggaaacggttgagcgcgatggtcatgagcagagcgccgaaaccgtagatgggagagaacggcccgaacagaagcccagcgcgatcctgatactcatggtatagcgcgaaatggaacagcacctcgatgatgagccccagcacgcagcacaccacgaagatccagaacaggttgaagaagttcagcgtgatgaacccttttttcggcttgcgctcgcgcgccaacctcctctcttccgagcgctgctccttgtccatcttcttgagcttgcgctgtagccggcgctcctcgtgcaactgcgggtcgagatagctggtcaccgcgacgagaatgacgatctgaacgaggtagccgatgtggtgcgcagacaagccgaacagcatcagcgtgccgatgacggccagcacggtgagcgccgcgagggtgttcgccgcctgcgccgcgtgggctcggcgattgcgcagcagccgcacgcccaagaacacgaacagcacggccgatgacgtgagcaccgccatgagaccggcgaagatgacgatggacgccgttcggtacgtgccgccgccgacgccttgcacgaaggagaagatcaccggcgccaggtcgccgagggaagcgagtcctcctactatgctgagaacgccgaataccttgagcggcaccgggaggcgaccttcctcgttcaccgtgtcgttcatgcaagattcctttcctcggtcgttgacgataccgcgcgcacatcgtacgcgccgtcctccacccgccacgcggctgtaacggtatcgtaacgtgagaacgagcgctgcggaagggcggcttcgcgaaacgccgaacgccgcaacggggaaaagctatgcgagggccgcgcctaggcttcggcgcggccctcgcatagggcatcgacgaagtagcggtgataggcctcgtgcatcttgcgacgctctttcacgcgtaccggcacgcatgttccgtcgcgtagaatgaaatcgtcgcaaacgtcggctatgtagtccatgttcaccaaacagctgcgatggcagcgcaggaagcggggatcgttcagatcctgctgcacgtcgtcgagcttggccaagccgcgatggcaggctccgtccgcggtgtgcagcagcaccgaatgatcgcggctttccagatacacgatgtcgccgaaggcgaaatagcgccgcgatgcgcccacccgaaacgccagtcgaggctcgctcgcaggcagaacccgatcgaggacacgctcgatggcggccgggtcgagcggcttcatgaggtagtcggtcgcacgcacctcgtagctttccaccgcatgctcgcgcgagacggtgaggaacacgatgggaaccgccgcgtccaccgcgcgcaacgcgcgggccgccgacacgccgtccacgccttcgaggtacacgtcgaggaacaccagatcgaacggatctccgttcgccgcatcggctaccaggcgctcgccggccgtgtactcctggtaccgagcccgaacgttacgccctgccagcgaccggtccagcgcactgcgcagatcgcttcgcagcgctccgtcatcatcgcagatcgctatcctcaaaccggaacctcctcagttttcgacgtgtcgctatattgtccgatgaagagggttatattgtccagaaccggttacgacgcgaaaagcgccgttttcgcagctgggataacgtgacgatgaaaactacccgtccagctcgacatcgcgcctcaagccgtaatgcagcacgaggtagtacgctatgcccgccgccatccagataaggccgagcaccttcgccggcacgtcgaggctccaccacgtgtatccgatcaccgcgatgccgcacaagggagacagtaaatgcgccgcccagcgcccgtcgcgcttcttgatgaagaagtacccgatgacggtaacgtgtagcatgaggaacgcggagagcgctccgaaattcacgaacagggatatggtgtcggtgcccagcctgccgaacgtcagcaccagcacgagcgtgagggctcccacgaacagagaggcgacgtagggcgtatggtacttcggatggatcttggccaacggcttcggcagcccgccggcacgccccatggcgaaaagtatccgcgacacggccgtctgagcggccaacgccgtgaagattccccaggccagcgccgtggcaacggcgcacacgatgtacagccagcgtccgcccacgacctgcgccaccaagtagaaggcgttgcccgagtcgcccgcgaacgcggcgccgtcgggactgatgcagcccgcgatgtaggtctgcagcacgaacagcgcacccacgatgaccagcgatgccatcatggcgcgacccgggccgcgtcggccgtccttcgcctcctccgacagcgtggcgatgccgtcgaagcccagaaacgacagcacgcccaacgacacggcgctcatgacgaggttcgggtcgaacgtcgagggattgaagagcgggtcgagcgagaaaccgcgcgacgaagggtcggcgagcagccatcgaacgcccagcacgacgaagacgagcagcacgaggatctccagcacaagcgccacgcggttcacgatatcggtgagtccgatgccgcgcacgttcacgaacgtgttcgcagccacgaacgccacggcgaacgcccacgggggcacttcgggcacgagcccggacagcgccgtcgaggcaaccacgtacatgagcaagggaatcaacagataatcgagcagcagcgtccagcccgtgacgaaaccaatgcctttgccgaggccgcgcgaggtgtaggcgtacaccgagcccgccaccggccactcgcggatgagcatgccgtaggacagcgccgtgaacaccatggccagcgtgcccacgagatacacgagtgcaggcatgccgcccgactccgagaacacgccgccgtagatgcccattggcgcgatgggaaccatgaagatgagcccgtacacaatcatgtccggcacgccgagcacgcgcgcaagcttctgcccgcccggctgcctgccggcgctcgcgtcggacgaggcgcgcttcgcgccgccgtgagccttatccaccatgcagccgctcctttcgccaggccactcggatgtccggcgcgcaagcgccgagacgtacccgatacacgatacggcagagcccggaagggcgctggaagacccgaccgtccttgccgatgcgttgccagcctgtcggccaggtgttttcgcatcgaacgccgcaagctccgcaaaaaggaaagcccgctttcgcgggctttccgagcaggtttagaagtcgatggtgtcgggatcgagaccgctttggccgagaggatccagctcgtcgatacgctgcaggtcctcgtcggtgatgtcgaaccagaagatgcgcgcgttctcggcgatgcgcgccgggtccgtggacttcggcagagggatggcacggcgctgcaggcaccaacgcaggcacagctgcgccaccgtgcagccgtagctggcagcgatgtcgatgagcagctggttttccagcacgcgacccgagcccagcggcgaccacgcctccaccacgatatcgtggcggttgcagaactcgcgcgtgacctcctggttgcagccggggtgcagctcgatctggtcgaccatcggcaggatatcggccgcgtccataagcggttcaagatgatggggcttgaaattgctcacgccgatggcgcgcacgagcccgtcgaggtagagcgtctcgagcgcgcgccacgtctcctggttcgtgcgctgccattcggcctcggcgccctgcgcagcgggccagtggatgaggtacaggtcgacgtagtcgaggtgcagcttggcacgcgattcctcgaacgccttgagcgtcgcatcgtagccgcgatcggtgttccacaccttcgtggtgatgaacaggtcctcgcgcgatatgcctcccgaggcgagcgccttgcctaccgtgccctcgttgtcgtaggctgccgccgtgtcgatatggcgatacccgtcatgaagagcctgatgaacggcatcgatccccacttccccatcgggcatcttccacgtgccgaaccccaggcagggaatgccgtatccgtttcgcagggtgatacgatccttcgggctttgcaaatccgccatgcgtgctccttatcactcatacgccgccgctgacgggcggcgtgaaccgtcgttactcgtccacgatacgcctgcgcagcgcgcggtcgccgaaccgtagcgcgctcgtagaaggaaggacacgcaagcgttaccccgccggcgcgggcggcttcgcgcccgctcgaccagtccgagtcacgacggcgacgtacgccgaaatagaaaatttggcaggaaacgctgcggcaacccggctccgcgggaggacgcccaaccacggagggaacgcactggctgatcgcctgcgtcactcgtcgacgcggccgcgctgcgccttcgtttgggagcgccggcgcttctgggcgagacggcgctccttggaggcgcgggtcgccttcgtggcgcggcgcgccttcggcggcacggcctcgcgcacgaaccggtcgcgcagcttctgcaagcacagctggcggttgcggaactggctgcgcgactcgtgagacgtcaccgtcatgccgctgggcacgtgcgtcatgcgcaccgccgagtccgttgtgttcacgcactggcctcccggcccgctcgcgcggaacgcctgcacgtggcagtcgcgcgcgatatcctcgagcgattggcgcgcccagacggcgtagtcgcggtatgtcggctcatcgtgacccatgatcgcatcatagcacgacgcccgcgaacgcacatcatcgcccgaaaaacacggaatcgctcctgcaagcgtgtttttcgggcgatgatgcaaagtcgacctgccgaccgccggcgccgccggcaggtcggccccttaatcctcgatgccgtcgttgttcctgatcagcttgcgcttgatcttgccgccgatggtcttgggcagctcgtcgacgaactccacgatgcgcggatacttgtagggcgccgtcgtgtgcttcacgtggttctgcagctcgcgcaccagctcgtcggaaggctcgtaaccgcgcgccaacacgacggtggccttcaccaccttgccgcggatgggatcgggcgccgccgtgacggcgcactccaccacggcgggatgctccacgagcgcgctctccacctcgaagggcccgatgcggtaacccgagcacttgatgacgtcgtcgttgcgacccacgaagaaacagtagccgtcggagtcgcgccacgccatgtcgtgcaggttgtagtactccccgcccacggcctcgcgcgtgcgctcctcgtcgcgatagtaccccacgaacagtcccggcgggtacgcctccttgagccccgtcacgcagatggcgccctcctcgccgtcgggcacctcgatgccgtcgtcgtccagcagcttgatgttcaaaagcggcgaaggcttgcccatggaacccggacgcgggtcgacccacgggaacgtcgccagcagcaccggaccctcggtctggccgaagccctcgcggatcctcttgcccgtcaaacgctcccacgccaacgtgacctcggcgttcagcggctcgcccgccgtggcgaagttgtgcacgctcgacaggtcgtaggcgctcacgtcctcctgcagcatgaagcggtacatcgtcggcggcgcgcagaacgtggtcagcttgtagtcctggatcttctgcagcagcttcgtgggcacgaacttgtccatgtcgtaggcgaagacggtggcgccggcgatccactggccgtagatcttgccccagccgaacttcgcccagccgctgtcggtcacgctcatgtgcagcgcgtcctcttccacctgctgccagtacttcgcggtgatgatatggcccaacgggtgggcgaagttgtggcacaccgctttcgccatgcccgtggtgcctgacgtgaagtagatgagcatgatgtccttgctcgtgacgcccgcctcgcccctcgggcgctcgaactcgtcggactcgccctcgatcagctggtcgaacggcgtccagccgtcgcgctcgcccgccacgatgatgcggttctcgatggacggcgattcaggcagcgcttcctccatctgcccgcatacgtactcgtcgttcacgcaaacgaccgccttcacctgcgcgctatcggcacggtagacgatgtccttcttcgtcagctgcaacgacgcggggatgatggtggcgcccagcttgcacagcgccacggcgcacacccagtattcccagcgacggcgcaggatcatcatgaccacgtcccccttgccgatgccgagcttgcgaaacgcgttggccgcccggttcgacagcttcgacaagtcgtcgaacgtgaaggtgcgctcctcgtcgcgatcgtcgcaccatacgagcgcacgcttctcgggatcgacgcgagcccactcgtccaccacgtcgaagccgaagttgaacgcctcgggcacgtcgatcttgaagttctcgaagaagtcctcgtacgaatcgaactcgatgcgggggcagtattttttcaggatatggttcacgggctgtgcttcctactctgcgatgatcgtcacgaattttgcagggatatctccgccgcagcgttggccgtgcggatgctccggattgaagtagatgctgtcgccggcgttgagctcgaactccttgtccgcccacgtcaccacgacggtgccctcgatgacgagattgaactcctgaccggtgtgcgtcacgagcttcgcgggctcgtcggaaggatcgagcaccacgagcagcggctgcatgatcttgccggtgtagcgccacgcaagatcctcgaagtggtatcccggataacggtcgacctcgcgcccttcgccccagcgcaccacctggtacgtgtcgagcttggccgcggtgcccgtgaggatctccgtgaactccacgccgaagtggtgcgccatgtggtagatggccgaaatgggcacgtcgtcgccggtttcctcccagcggacatacgtctccagcggcacttccagctcggccgccatgtcctcgcgcgagacgtcgcacgcctcgcgcagacccttgatgcgcaggccgatctcggccagttcagctaccatgcgaatcctacactttctaacgcgtacatttccaaatcggtcagcgaggctttccgtggtgcccgagattggcgcgaaagcccgaggaagcgtaccttgggtacgcgacgagggcttggagcgccaagatcgagcgccacggaaagccgccccctacggggactagctgcgcgtcgcagcgtcgagcagttccgacggccggcaggccgtcggaacgatcatgcgtcgattcccagttgcagggctcgtttgttcatgtcgagcatcgccgctttcttcgcgggcacgcacttctcgatggccttccagagggtctcctcctcgcagaagcgcgtctcggcgaacagcttgccggccaggatgatgttcgccagcttcttgaagccggcctcctcggccatggccgtcgcggggatggcgcacatgcgcacgccctcgatctcggggatgcgctggacgagcgtggagtcggccaccacgatgccgccctcggccacgctgcgctcgaacttgtcgagggacggctggttcatggcaacgagcacgtcgggggcgagcacgagcgggcttccgatgggatcgtcggacaggcacacgctgcagttggcggtgccgccgcgcatctcggggccgtaggaaggcagccacgacacctcgcgatcctccagcagaccggcataggcgatcagcttgccggcgaacagcacgccttggccgccgaagccggccagcaccatgttgacggaacggctcatcgtgcgcctccttccacctgcgggtcggggtgcgcgatggggcaggcggcgttgcgagccgaagccgcctcggccgcgttcgcgtggccctcggccaccacgtccttgtacacgcccaagggatagtacggcagcatgttctcgttcatccaggcgaatgcgtcctgcggcgtcatgccccagttcgtcgggcacgtgcccacgatctcgacgagcgagtagccgcgcttgtcgatctgggtctggaacgctttcttgatggccttcttcgccttgcgcacgttcttcgggcagtcgacggtgacgcgctcgaggtacgccacgccgtcgagcgagctcagaagctcgcacacgcggatggggaagccggccgtctcggtgttgcggccgtagggagaggtctgggtcacctggttcggcaggctcgtgggagccatttggccgccggtcatgccgtagatagcgttgttcacgaatacgacggtgatgttctcgccgcgcgtggccgcatgaaccgtctcggccatgccgatggacgccaggtcgccgtcgccctggtaggcgaacacgacgccgtcgggcagcgcgcgcttcacggcggtggccaccgccggcgcacggccgtgcgcggcctcgatcatgtcgcagccgtagaagtcgtaggacgtgacggtgcagccgacgggcgcgatgcccacggtggagccttccacgtccagctcgtcgaggcactcggccacaagacggttgacgatgccgtgggagcacccaggacaatagttggtgacgacgggcaggagcgcatggggtcgctcgaacacgactttcatttccttgtcggccatggcctactcccctcctttcgcggatgcggcgattgcttcgttcatggcttccagcttggccagcacctccaccggcgtcgggatgacgccgccggtgcggccgtagaagtccaccgggcggcggccggccacggtcaggcgcacgtcgtccaccatctggcccatgttcatctccaccgacaggtaggccttcgcctgagggatggtggcctcgatggcgtccacggggaacggccacagggtgatggggcggacgaggccggctttgacgcctttctcgcgagccgcgaccaccgcgctgcgcgccacgcgggcgctcgcgccgaacgcgaccaccacgatgtcggcgtcgtcggtcatgaacgcctcggcgcgctgctcgtcgcgctcgatggcggcgtagcgctcgtagcgctccacgttgaggttctccagggcctcggcggtgaggtacagcgagttcaccacgttatgggggcgctggtgcttgtggccgcatgcggcccagggcttctcgggcagcgagtcgacgggctcgggcatgaccacgggctccatcatctgccccagcatgccgtcggccaggatcatgacgggcgtgcggtacttgtcggccacgtcgaacgcgttgtacacgtagtcggccatctcctgcacggtggacggagcgtacaccaccacgcggaagtcgccgtggccgagcgcgcgcgtggcctgccagtagtcggcctgagacggctggatgccgccgaggcccgggccgccgcgctgcacgttgatgatgacgcccggcaggtcggcgccggccatgtaggagatgccctcgcccttgagcgagatgcccggcgacgaggacgacgtcatgacgcgcgcgccggccgcagccgccccgtacaccatgttgatggccgcgatctcgctttcagcctgcaagaacgtgccgccgaccttctccatgcgcttggacatgtaggccgcaagctcggtctgcggcgtgatggggtatccgaagaagaagcggcagccggcgcgcagggcgctctccgccaaagcctcgttacccttcatgagcactttctctgccatggtctacctctctaccgtgatcgcaacgtcagggcacatgaccgcgcaggacatgcatcccgtgcacgcgtccaggtcggtgcagtacgcgggatggtagcccttcacggtgatcttgtcgcggtcgagcgccatgatctgctcggggcacgcgtcgacgcacaggccgcaccccttgcagaaggagtcgtctacgctgattctcgccatgatccgccttcctcgtctcgtccgaatgcataaacggccggactggagcgtccggcgcgcagctctcttgtctattcccagggagttcttacatatacttgcacaggatagtacgtttgccgatccccattcggcgcgcggtgggtagtttcccggtcggcgacctggcgcgccgccgcagcgggcaccgtggtgcatgccaagggcagcccggccgcttgcgcaaccgcttgcgcgaacggcaggccctgctccacgacctgggcgtcggtgtcgtgctgcaggtgcgtgttgttcacgacgcacgtggcccgcaagtgcgatttcgcctcgatctcgcgcagcacctccaccgcctcggccggctcctgcgtgaggttgcggttgcggttcaccacgtacagcatctcgtagggagcctgctcgaccgtgcgcgcgaagcgcccgagcgccgtggcgcccgcatcgtcgccgcccgcatcgatcaccacgaagggacgctcgtcgccgtcgcgccaggctcgctgggcgccgtcgatggccggctcgatggtgccggacaagctgggtccgtccacgttcgtgcccgcgaacacgggcgcgaccaaacggatgccgcgctcgtcgagcagcgcgcggtagtcgctggagcggaagaaggggttcaccacgtcgaggtcgatcaccgtgaccgcgcgtccccccgcagccgcgtcgagcgcaatgttgagcgtcaggttcgtcttgcccacgccgtagtgcccgcacaccacggccacgggcgcatccatcatcatacgaggccttccagagctttcgccgcctcgtccgactcgcggatggctgcgcggcggatcttgccgttcacggtcttgggcagcgcgtccacgtactccacgatgcgggggtacttgtacggcgcggtcttgtgcttcacccaggtctgcagctcgcgtgtcagctcggaggaaccctcgaaaccctcggccaaaacgacggtggccttcacggccttgccgcgcgtggggtcgggcacgccggtgacggcgcactcgcgcaccgcctcgtgttccagaagcacgctctcgatctcgaaggggccgatgcggtagccgctcgatttgatgacgtcgtcgttgcgcccgacgtaccagaagtagccgtcctcgtcgcaccacgcggtatcgccggtgtggtaccagccgcacgtcatggcggccgcggtcttctcggggtcgcggtagtattccagcatgatgccggcagccttctcgtggatgtcgatgcacacctcgcccgtctcgcccacggcgcagcgggtgccgtcgtcgcgctggatctcaacgttgtacagcggcaccggcttgcccatggagccgggtcgcggagtggagttcgtcaggttcgcgatggtcagcggcgtctcggtctgcccgaagccctcgtagatggtgagccccgtgtgctccttccagaaatcgaacagatcgggattcaaggcctcccccgccgtcgtggagtactggagcgagctcagatcgtaggcgtcgacgttctcggtcatcatcatgcggtacatcgtgggcgggcagcacagcgtggtgatgcggtgctcgccgatgagcgacaggatctcggaggggtggaagcggtcgaagtcgtacgtgaacacgcacgcctccataagccactggccgtagtacttgccccataccgccttgccccagcccgtgtcggcgatggtgaagtgcaggccgtcgggatccacgttgtgccaatgcttcgccgtgacgagatgcgcgatggcgtactcggaatcgtgcagcaccattttggggttgcccgacgtgccggacgagaagtacatgagcatagggtcggccgccgccgtctcacggcgctcgaagtcctcggacgcggcgcgcacgcacgtgttgaagtcgagccagccggcgcgctcgacgcccgccgcgcacacgccttccggccccgacagcgcctcgcccagcggcaggccgtcgtcggggaacacgaggttgccgtcggcgtcctcgggcgtgaggccgccgcccgcgccgttcacgaggatgcggcgctcaagcgtggggcacgcgtcggccacgcggtcgcacacctcggcgatgtcgccgagcgatgtggcgatgacggccttgacggacgcgccgttcaggcggtattccaggtcgtgttccttgagcatgaaggtggcgggaaccatgacggcgcccagcttcgccagcgcggtggccacgaaccagaactggtagtggcgccgcaggatgaccatgaccatgtcgccgcggccgatgccctgctcggccaggaagttcgcggtcttgtccgaccagcgcttcatatcggcgaacgtgaacacgtggttctcgccctcggggttgcaccacaccatggcgcggcggtcggggtcgttcacggcgatgtcgtcgaccacgtcgtagccgaagttgaagcttgccggacagctcacctcgaacgaggaaagcacgccgtcctcgtcgtaggcctcgttcacgtagcggaggttgatgtttctcataatggtgtctttctcggaagatcgatgcagcggaaggatccgccgcgagacggatgggatcatcggatgcggggcgcatacgctgggggcttgttcggcttctcgccgcctgcccggggcgctgcgcctagataatctccccgttcggcttcatgaccaccgcgaggaacgtgcacggctctccgcctgtggcgatcatgccgtggccgcggctggaatcgtacatgagaaggtcgcctgcctcgagctcttcgatatgatcctcgtaggcgaagcgcatgcggccggagatgatgtagtcgagctcctggcccttatggtaggaaaggtggatgggcgcgtcctgctcttcctcgaggtacggcgccgtcaccaggaagggctcggccagcttgttcttgaaatgaggagccttgtgcaggtactcgaagcccgcacggcgcttgatggacaggccctcggcggcgcgggtcaacgaatagcccgacagatgcggatcctcgccggtcagaagctcgatgacgtcgacgcccagacgctgcgcgcacttgtagaggaacgtgaacgacagatcctgctgccccgactcctgtgcggcgtactcggccaccgagcgccccgtcgcgtcggccatctcctgcatggtgatatcgaggtcttcgcgcagcgcccgaattcgcccagccacctcttcgatgttcggctccatgctcgcttgacctccttctggtatatcgttggtataaaagtttacttattgtatagcaaaccgcttcgattcaggggaggacgaaaccatttggaaacaaaaaagcggcccgatggcggcggcgacccaagttgtcatcctgagcggagcagcgacgctgcgtaatcgaaggatcccgtgcggcggtagccggaagcgccccggccgatgccgcacggaatccttcgattacggcctacgcccaggatgacaatctcttacgcgggaacgccgtcgccgaacaggagctcgcgctccgggccggtcagcgcggcgcgcgcctggtcgcgcaagttgttcatgccgctgaggaactggcggtacatgaccacggtcaggtagcgtccgataggcgtcagcgtcagctcttcggcgttgtcggtttcaaacgccctgttcagacgcatgaaagccaattccatgggaagacctgtctcgatgctgcagccgaagtcgcgctcgaaggcgcgcttgtcgagccgcagcttgtacaaatcgagcaggaagcggtagcgcatgaggtcgcgcttgctcatctcggtcttgcccatgatggacatgcgcccgctctcgatggccgcgttgtagtctttgatgctgaagttgttcacgtacaagcagccgttcaggtgcgtgatggagccgctgccgatggccggatactcgtcgtagttcacctggtactcgtcgatctgaggcgcgtcggccggcttgcccgccttgtcggggcgcgtgaacgtccacagcgtggtgcggtcgaacagcgggtcgtcgccgccggccagcacgccgtcgaggatctggtagtaacggtactcgcggtcgtagtccatcgcgcctaacgtagcggccattttgcgcgtagtggccgacgacacgtacagcggagagaacgtggtctggcggcaaccggacagcgcgatcttctcgaggtcggccatgagaacgtcctcggtctgcgaggggaaattgaagatcatgtccacgttcagcgagtcgaagtacggctccgcctcggcgatgcgctccaggatgacgtcgccgctgccgtacttctcgtagcggtccatctgcttgagcaggtcgtcgtcgaagctttgcacgcccacgctcaaacgctgcacacgaccctgcagcttgtccaaccacggctgcgtcagatggttcgggttggtctcggaggcgacctccctgatgttgaagttgtcgcgagccatgtcgagcgtctcgcacagctcgtcgatcatgacggtgggtgtgccgccgcctacgtagatgctctcgaagtcgtagccgagatccttcaacatcagcatctctttgcgcatgttcgcgaagtagggccgggcgacctcctcgcgaaacgggtaacggttgaagctgcagtacgggcacaggcgctcgcagaaagggacgtgcatgtacagcatgtacttctgcccgggattggcggacggcatcatggtctcgctcgtggggttgagagccagatgctgcttggtcatggtatggatcaggcgcgacagtatgcgctcggaaagcatgtaagtctcctattcgcttcaaagatttcggtacccatagtaaggcttttccgacggtttgcacccgctatttatcctcgtacataaagaaaaacgggcccgggcgcatgccccgggcccgcagcgtcgcaaggacagccgcgcctacgcgatgcgctcgaagcggacggcgaagtgagcatccggggagccgggggcgaggcgcgtggccacgcaggagcggccgttgacgggtgccagcttgaagcccgcgccggcctcgctttcgaggaaggccttcaccacgccgttgttctcctcgcgggttaccgtgcacgtggcgtaggccagcgcgccgcccggggccacgtgcggcgcggcagcctgcagcatgcccagctgcacgcgcgcgaactcaacgatgtcggccggcttgatgcgccagcggatctcgggatggcggcgcagcgtgcccagccccgagcacggggcgtcgatgaacacctcgtcgaaggcgcggtcccccaccacggcgtccagctccagcgcgtcgcccgtgaacgcctcggccacctccgcgccgtagcgctcggcgcgctccagcagaagccgcgtcttgaacgcatggttgtcaagcgtagacaggaccagctgtgagccgtaggcgcgcgtcgcatcgctttgcagcaggatcgtcttcgtggcgcgaccggcgcccacctccagaagcgacgcgggcttccgctcaggcagcaccgaggcggccaccagctgcgaagcggcgtccgtcacgaggatcttgccctgcgagaacatccgcttcacctcgggaagcagcagcgcgcgtgtgtcgagcacacggtagcagccggcaacgctcacgccgtccaccgataccgggtccagcccctcgtccagcttgtcgaacgctttgaccagggcctcgtcggaggttttcgccgcgttgacggcgatgaacagcggcgcctgctcgttcgaggcgcgcatgaagtcgagagcctcctgcggccccaagtcgacgatgagcttgcgcgccaaccacaaggggaacgcatgcaggcgcgcgagcgcctcggggtcgcgcatgggatcgccgaagggaaacgcctgacgcatgagcacgatcttgcgcagcaccgcgttcgccagacccgacgcgctcatcgcgaaggagcgcacgagctccacgccctggtcgacggccgcgtgcggcgtcttgccgaggaagatgatctcgtaggtgctcactcgcaaggcatcgcgcacgtcgggtttcacgtcgctgggcgcgttgagcgcgcgatcgatgatctcgtcgagcgtgcccgtggcgctgaccacgccgagagccagcttcgtagcgaacgcgcgatcctccgacgagaggtcggagcggtcgatgcgcgtgccgatgacgtcctgcgcgaacgcgtcgcgctcgcgcacggcgcgcaccacgtcgagcgcggccaaacgtgcggggctcgccttcgagcgcggcttcttcggagggtttttaggtccggcgtagccttggggctttcgcgtctcacgtgcttcaggcatggggttcctcccaggtcaggccgccgtccttgattccctggacgcccgcggcgaacgaacgcgcgtccatggtctgcttgccgtcgggcttgagcgcgcccacctcgagcgcgccgtccgccatgccgaggaacaggcgcttgcccgcgaagcgcacctcccccggacggatgcccgccgccagctcgcaacccgccgcgtcctcgggcgcgtgcgcttcgagcacggtgacgccgcgcccggcgacgacggcgcgcgacgggtgcggcgcactcgacgcctgcactttgcgcgccgcgagcgcaacgtcgtcgttcggcgacaggtccagctcgcgcttctcgatcttcgaggcgtaggtgacctgctcctcgtcctgctccgtccactcggcagcgtcgcgctcgacatgcacgagggcggtgagcagggcgtgcgagcccaggtcggccagctcatcggtaagctcggaggcgcttttgccgtcgacgatggcggtgcggcacacgcagtaggcgcctgtgtccaggccctcctccatgcgcatgatgcacacgcccgcctcctcgtcgcccgccaggatggctcgctcgatgggcgcggcgccgcgccagcgcggcagcagcgacgcgtgcacgttgaggcagccgaagcgagggatgtcgagcacctccttcggcaggatggcgccgtaggccgcgacgcagatcacgtcgggggcgaacgaggccagctcgcgctgcgccgcctcgtcgcgcagggtgcgcggagtcagcacgcgcaagccgcggcgctcggccgcggccttcaccggcgagggctctaagcgcttgccgcgcccgcgcaccgcgtcgggacgcgtgtacaccgctgccacgtcatgctgctccgccaaatcgtcgaggatggtcgccgcgaacgcgggcgtgcccatgaacacgacgcgcatggttagcgcacccgcgcttcgagcgaggtctcccccgggcgggcgcccgcggccagcgctatctcgtagtcgcgcagcgcctcgatgcgggccatcgggtcgcagcgctcgaacatggtgatgccgtcgaggtggtccagctcgtgctgcaggcagcggccgaggagatcgtcgccttcgatctcccactcctcgccgtcgaggtcgaaataacgcacgcgcgcaaacggcgggcgcgcgatgggaaccgtgatgccggggcacgacaggcacccctcgcccgccaccaccggatcgccctgcgtgtccaccagcacggggttcaccagcacgatgggattctgctcgccttcttcctggtcgcagtcgatcaccacgagccgcttcgccacgccgagctgcggcgcagcaaggccgcaaccgtcgttcttgtacatggccttcgccatctgcttggccagcttcttcaagctcttatcgcctaggtcgcacggatcgcacacctggttcaggatagggttgggggactgcacgatggaaatcacggtcaacacgtccttctgaattatgggacgcgccgcccgtttcagggcggcgcgggttatcgtcggattcgtattgtccggtttcgggcgcaccttgtccagcaaacttccgaaagctccacaaaacgcgaggtgggaagggctattgcttgtcgtccgccacgatctccttgagggaggcggcaaggcccgccatgccctggatctcggaggggatgatgagcttcgtggcccggccgttggccacggccttcagcgcctcgaaggcctgcagcgtgagcacggcgttgtcggcgccggcctcgcgcaccatgcggatgccgtcggccgtggcctgctgcacgttcttgatggcctcggcctcgccttcggcttcgcggatctgcttctctttctccgcttcggcggcgagaatcacctgctgcttcgcagcctcggcagacaggatctgcgcctgcttgttgccctcggcgatggtgatggcggcctgcttctcgccctcggccagaagcaccgcctcgcgcttctcgcgctcggccttcatctgcttctccatggcctgctggatggcggagggcggcgtgatgttcttcacctcgacgcggttcaccttgataccccaggcgtccgtggcctcgtcgaggatggcgcgcatcttcgcgttgatggtgtcgcgagaggtcagcgtagtgtcgaggtccaagtcgccgatgatgttgcgcagcgtggtggccgagaggttctcgatggcgaggatcgggctttcgaccccgtaagtgtacagtttcggatccatgatcctgaagaacaccaccgagtcgatggacatggtgacgttgtccttcgtgatgacgggctgcggcgggaagtcgaacacctgctctttgagcgagatgtaggggcgcacgcggtcgatgaacggcaccttgacgtgcaggccgttgttccacgtgtcgaggtacgagcccaagcgctccacgatggcggcttcggcctgcgggacgatcttgatgcacgtgaccgagaacagcaccacgagcacgacgatcacgatgatggcgatcagaagcgggtcgagggtgatcatgctaggacaccttcctttcgacgatgagcttcacgctctcctgccccacgatgcgcacgacggcgccctgggggatgaacgagccgtcggcggaacgcgcggcccaggtcatgcggttgtcggtttccacgcgtccggtgaggccctcgttgtcgacgtcctccaccacgacggcggtctgcccgacatgggtgggctcctcctgctttccgcggtcgcggtacttcacgaacacggggcgcagggccacgaggcacacgacggaaacgaccaggaacacgacgatctggacaagcaggtcggcaccgagcaggttcgcagcgaacgctgcgagcgcgccgatgacgaaccacatggtgatgaggccgaacgacacgacttcgacgacggccatgacggcggccacggccaaccagatgaaggggctcacgggctcctcctttctcctgcgtcgagtataccatccctcgtcttcggcgtgcgcgaggcgaggaaaccgatcaggaacgcggggaaagcggcttatgggcggctcggcggcgcttgaggtcctgctgcatggcggccacggcttcgtagagcatctccagctcgtcgggatcgaggcgcgacgggtcggcgatctgcgcgcgcagggcgcccaccgcatcctcggcatcgccgatggcgagctcctccacgaggaaggccgccagctgctcgggcgcagccgtctccgacacggtgcccgacgtcagcacggcagcggcgtccggaagcgcgcgggacgcctccgtcacgagccgcgccgaggaggccgccggatcctcggccagcacgtcgagcatgctctgggcgatcgcggcgtgcgcctgctcgtgccactgcgtctgcgcgagcgcgtcggcatgcaggagcgccaggtcggggcggcgcgcggccagcgtcagcagctgacgttcgaaacgacggcggttgatctcggcgcgcggcaggttgcgagccggcctccgcggagcgacggcacgctcgaaaccttccggcgcggactcgtcgtcgcgctccccttcggccttcggagccttcaaatgctccagctggtcgatcacgtcctgctcgcgggcgcgcacgctcgtggctatctgcacggcgtaatcgcgcgcgagcatggagtccttgatgggggccagcacctgcagcgcgtcggcaagggcggcggcgcggccctcggcgcggctgaggtcatggcgcgcaaggcggcgctcgatgccgtacttcagcagcggctgggcgttcgcgatgagcttctgcagctcctcggcaccgcgctgggccacgaagtcggccgggtcgaggttgtccggcagcgtgacggcagccagctcgatgcggctcttgcccgcctcgggcgtcatggagtcgtcgatgaacgcgagcgcccggtcggcggcgcgctggcctgcctcgtcgccgtcgaataggtatacgatgcgatgctgcgcgtggcgcgacagcaagcggatatggcgcatggtgagcgcggtgcccagcgtggccaccgcattcctcacgcccgcctcgtgcagcgcgatgacgtcggtgtagccctccaccaccacggctatgccggtcgaggccatggccgctttcgccttgtccataccgtagagcacctgcgacttgtggaacagcggagtctcctgcgagttcaggtacttcggctcgcccttgcccaccacgcgtccgccgaaggcgatgcactcgccctgcggatcgttgatggggaacatgatgcggttgtagaagcggtcgcgcagcttgcccccgtcgttcgacagcgccacgttcgcctgcaccatctcgtcgggcttgaagcccttcgcagacaggtggcgcaccagctgcccgtgccccggcgcaaaaccgagctgccaggtcttcggcacctcgccccccaggccgcgcgcgcccaggtagctgcgcgccgccgacgcgtcggagccggggttgcgcatgagctggcaatggtagaactgcgaggtctcgtcgcagacggccttgaggcgggccttgcggctgctgccgatgctcttgcgcccgccgctctcggcgatgtcgatgtgcgcgcgctcggccaaccggcgcacggcttcgggaaacgacaggtcctcggtcttcatgatgaagccgaacacgtcgccgccctcgccgcagccgaagcagtgccatagctgcaaggccggatcgatcttgaacgacggggtcttctcgttgtgcagcgggcagcagcaccagaaatcgcgcccgcgctgcttcaccggcgtccgctctccgataacctcgacgaggtcgttggcctcgcgcaccttctggatgtcctcttcgctgatgccgcccgccatcgcgacccctacctgcgtctgttctgcttcgccagcaccacgttcacgaggaacacgaatgccaacgccagcgacggccccagctcggcgatgccgacgccctcctcgcccgcgttcgcgtacgcgagcacgaggctgcccgtcatgaggacgaagctcaagcccccgataaccgcgaatatccactgcctgttctgcatgcactccctttccgtgttcgtcgctgtccagtatagcgcaagcgcgcgctcgcggcgccgcggcgggaaggcgcagggcaatcagcaggatgccaaccgaatcctgacaaaaccgcagcggtatcggacgccggcgggaccgctgctatgcttgatcggccggtcgcgcttcgccggcattccgaacgatcgcccgaaaagagaggtttgccatgaacgacgacatcacgattttggcggacttcgattctgcgctctacgagcaggtcgagccgcccctcgtatcgctctacctgcccacgcacggcagtgctcccggcgacgagagcgaccgcatcgagttcgaggccctcgtggagcaggcgcgcgcgaagctcgcccaggagcgcgagcgccgcgaatacaaaggcgtcgacgagcggctcgcctacgcagccgagcacttcgacgatctgatgagccccgcgcccggcggaagcctcgccgtgctcgcaggcaacgaccgaacctacatctaccggcttggctacgaggcgggcccgctcgcgttcgtgggcgagcggttctacgtcaagccgctgctgaagaacttccagttcggatcgcactacttcctactggggctttcggccgaccgcttcgcgttcgtccacggcgacttcggctcgctcgagcgcgtggagctgccccgcgacgtgctcgacgcgttcagcgaggagttcccgctcgtgtacgacgggcacgagggtgcgctggactactcgtcgctcgagaaccatatgccgccctaccacggctggaagtcgcgcaacgacgtgaggaaggaggaggccggaaagttcttccagtacgtgaacaaggcggtgaccgactacctcgtggccggcaccgacctgccggtgatcctcgtgagcctgcccgagcaccaaagcgccttccgccgcatctccaccatcccccatctgctggacgagggcatcgagaaggacatcggcggcatcgaggcccccgagctcttgtccgatgcgaaagccgtcatcgagcatgtgcgcgaggcgcgtgcgaccgagctgctggagaagttcggcgatgccgaggcgcacggcggcgcgtcatcggacctgaaagccatcgggctcgctctcgtggagcgcaaggtgcgcgccctgttcctggccgaaggcgcctacatccccggcggcttcgacgagcagacgggcgaggtcttcctgttcgagcgagagccgcacggccgcttccagggccccgagctggccgacggcttcgtccgcgcggcccttgcccaggacgccgacgtgttcgagcttcccgccgagaagattcccggcgactccggcatcgccgcgctgtaccggtactaggcgcttcgttaccatcagcactgacccgcttcgttaatgcacgcttttgtcaagctttcgtacgtatgaaaggcggttttgcttgtcaaaagcgtgcgtaagcggactgcaaccgcttggagccggcgcatgcgctcgctcgccggcctcttcgccgtacgcggctccatgcgctacaatgtcctcgatacccgcgacgcccgccgccgcgcggcgggctgcatcagcagaggacgcccatggaacgcacgaacatcccctatctctcactcaaccccgacatcgaggccgccatccgcgccgaccgcgccgccgggcgcgcgcacccgcatcgcttcgacgacgcgaacgtcgtgcgccgcgaacggaaccctcacgacaacgccacgctcacgcgccccgcgttcgcgcgcgacatcgagaagatcctcaacgtgccggcgtacaaccgttacgccgacaagacacaggtgttctcgttcgtggagaacgacgacatctgtcgccgcgggctgcacgtgcagttggtcagccgcgtggcccgcggcatcggatcgctgctggggctgaactgcgagctcatcgaggccatcgcactgggccacgacgtagggcacacgcccttcggccacgccggcgagcgctacctcagcgcctgctaccacgcgcgcaccgggcgctacttcaaccacaacgtgcactcggtgcgcgtgctcgaccagctgtaccgccgcaacgtcagcctgcagaccctcgacggcgtgctgtgccacaacggcgagttcgcccagcaggtgctgcgcatgggcgacacggccgacttcgccgcgctcgacgcgctggtggaggcctgcaacgccgacgagcggaccatcaagacgctgcgcccctccacgctggagggctgcgtcgtgcgcgtcagcgacatgatcgcctacgtgggcaaggaccgcgccgacgcgctcgacatgggcgtgatcgactcgctcgacgtcttcgacagcgaggtcatcggccgcgacaacgcacgcatcatcaacaacctcaccgtcgacctcgtgaacacgagctacggcaccgaccgcatcgcgctcagcgaggaggcgttcgccgacctcaagcgtgccaaacgccagaactacgagctcatatacgagcgcgaaggcatggtgaacggcgcaggcaacatcgtggaagagatgttcgaggagctgtacgagcgcctcttggaggatcttctcgcaggcgacgagggctcgccggtgttcaagcaccatgccgcctccctcgccgccaagtctcgcaccgtggagatcgacgagtacctggcatcggatccgaaccaggtggtcgtcgactacatggcctcgatgaccgacagctacttcatggcgctctacgcccatctgttcccgagaagcaagaagcgcatcatcacgcgcggctactgctccgatttaggctgagggcccaccgaggaaaggaaacgcctgtgaagctgctcatcgcatccgacctgcacggcgcggcgcccgccgtgcgcgcgctcgtcgaccgcatcgaagccgaagcgcccgaccgcatcgtcttgctgggcgacctgctgtaccacggcccgcgcaacgacctgccggaaggctacgcgccgaaagaggcgatcgcgctgctcaacggcctggcgaagcgcatcgttgccgtgcgcggcaactgcgatgccgaagttgaccagatggtgctcgacttcccgtgcatggccgactacgccctcgtcgaggccgacgggcacgtcctgtacctctcccacggccacctgccgggcaagtcccccgacgacccgcctacgctcgctcccggcagcgccttcttgtcaggccatacccatgcgaagacgctcgacgagcgcgacggcgtgctgttcgtcaacccgggaagcacctccatcccgaaggacggctcccccagctacgccgtgtacgaacacggcacgttcaccctgaaggacttggatgggaacacgctgcgcgaaggcggatgggagtagcccgaacggcgctcgacccttaacctaaccgtcctcgatccaccgtgtattccacgtcggctatcgcggcggtcgaggcgcgatggctcaccagcacgacggtcttgtcgccgcggccctcggagagcgcgcggagcacggcggcctcgttcaggctgtcgaggttcgacgtgggctcgtccaacagcacgaacggcgcgtcgtgcaggaacacgcgtgcaaggcctatgcgctgccgctcgcctcccgagagcgtctcccccagctcgcccaccggcgtgtccagcccgcgcggcagacgttcgatcaaaccgctcaacgccgccttgcggcatgcttcggccagctcttcgggcgaggcgctcggcttcgcaaggaggatgttctcgcctatggtgccggcgaacagatgcgtttcctgcgtcatgtagccctgcgtttcgcgcaagctggccgtgttcgcacggcgcacatccgtgcccgacacctccaccacgccgcgcgtggcatcccaaaagcgcatgagcagcttgcacagcgtcgacttgcccgaaccgctgcgcccggacaggtgcaccacgctgcccggttcgatgcgcaggctcacgtcgtcgagcacgggataccctccataggagaagtcgacgcgacgcaccgcggcgcccgagaacgtccccagatccacaccgtcgtcgacctcctcggtctgcgggcgctcgtcaagcagctcaagcacgcgccccccggacgcaagcgtctgctgcagcgtggagccgagattcgccacggcgatgaccgggccgaacgacgacatgagggcggccgtggccacaagagctccgtcgggcgcgatggcaccggacaagcacagcgcccccgacgccagcaccatcgcaacgtcgagcgccagcaccagcccgttcgtcaacgacatcgccagagcgccgcgccccttgaggcgcgcttccgcgcgggcaagctcgtccatgcgttcgtccagctcgcgcgaacgttcggccgctcggccgaattgcagcgtctcgcgcaagcctcgcaagctgtcaagcacgaacgcgttcataccgcccagtccctcccgcagctcgcgcccgcccatgccgctggccttcgaggaggcgtacggcaccgctacgcccaccagcaggtaggatgcaagagccagcaaccccagcgccggagatatcgtcgcgacgaacgccgtcatgcccgcagacacaacgaacgcgatgatcgccggggacaacgtgtgcgcatagaacacctccagcaattcgatatcgccggtcacaagcgaaacaaggtcgcctttgtcgcggccttccagcttcgccggagccaagcggcgcagcgcggcgaacacgcggtcgcgcacgagcgccaacagcttgaacgcgagataatggttgcacagctgctcgccgtagcgcagaggcccgcgcgcgacgccgcagacggccacgagcgccagcgcggcgccgtagccgacagtctgcggaaagcccgccaggtcgacgagcgcgtagaccccgaacaccgtaaggaagatggccgccccgaagcccagcactcccagcacgacggccaacgccatccagggagccagagggcgcacgagccccaccagccgcagcatcaccgacaagtgcgatcggcgcgtcggctcgacgggcgcaggctcttcccctcttcgcccatgcgcagggcagtcggggcagcgcgcaggctcggccgcggcgcgcgcggatcctccggaaaccgcagacggcgcctccgtcagccgatcctcgggatcgtccgcttcgaccgccgcagagaagcgctcgagctcggcttgccggctccataggcgcgcatacgggccgccgtgctccagcaattcgccgtgcgtcccggcttctgccacacggccgtcttccaacacgtagatgcggtcggcgccggccacggccgccaggcgatgcgagatcacgacgacggtcttcgtgcgcgccagctcatggacgacctcgacgatggctcgctcgctctccgcatcgacgttcgacgtggcctcgtcgaacacgtacgcaggcgtatctcggagcaaggcgcgagccagcgcgagtcgctgccgctgaccacccgaaaggtttccgccttcctccgctatcgctgcatcgagcccgcccgcctgctccacgaacccctctgcgcggcagcgacgaagcgcctcccacagctcctcgtcgctcgcctgggggtcggctagcagcaggttcgagcgcacgctccccttgaacaggtaactcgagaacggaacgaccgtgacggtgctcgcaagcgaggcgcgcgacgcctcctggatcggcacgccgcccacttcgaccgaccccgcgaatccggcgttgcgtcccgacaggatgcccgccaacgtcgactttcccgaaccgctctcgccgacgatgcccgtgaacgatccggcggccgcatcgaaatccacgtcggaaagcacggtgcgctcgccatcgtaggaataccccacgccgcggcatgcaaaggagatgcgatcggcttcgatgacgcgcgagccgcgcttgggttccggcgcatcgagaatcgcgaacatcttgtcggccgccgccatgccgttcatggccgtgtgaaagaacgaccccagcgtgcgcagcgggatgaagaactcggccgccaggaatatcacggcgaaagccgcgaaaaacggcgcctgcccgagcgagaactgccacagcgccatgacgatgcccaccgccgccccgccgtaggcgaacacgtccatcaccgtcacggagttcagctgcatgcgtaaaagccgcatcgtggcctggcggaacgtctcggcctcgcggttcatcgcctcgtggcgatcggcgtcgacgcggtagatcttgagcgtggtgaggccctgcaggttctcgaggaacgtcgcgcccaagtcggtgtaggcgtcccagtacgagcccatcgcgcgcttcgcgatcttctgcacggcgacgatggacgcgggtatgagcggcacgcaggccagaagcgccacggcagccggaaagcacagcggcgcgagacaggcgaacagggtgagcggcgccaagaccgaatagaacagctggggcaggtacgaaccgaagtagctctccagctgctcggtgccctcgacgctcacctgcacggcctcgctcgtggacacgcgctcggagtacgacggaccgaggcgcacgagcttgtcgtatacgagcttgcgcacggtgcgcttcgcggccgcagccgccgcctggcccatgcgctgcgagagcgtcaaacagcaaacgcgcacgacgatagccgccgcagcggccatcacgaggttcgcccgcgacgcggcgacgtccccaccctcgacgagggactgcacgaacgcccccatgagcagcatgagcgctatgttcgccgcgagcgcgacccactggagcgcgacgcttgccgctacgtacttgcgcgcttcgggcaccatgcccgccagccgtttgctgaacatgcctagccctccgtccgctcgacaacgcgttcggagccgcgctcggtcgcagagccgcgatccgtcttcacgatgaagccgaaatacgcgacatgcgccacccatacggcagcaacgacggcgcgtcccaccggcacgttcgccatcagaaggaacgaggcgcccaacacgagcgtgacggggcccagcagcatgagcttcgccttcacggtcatcgcgcgcttcttcgcgaagccttcgagcacggtgcggtacagcttcgtcccatggaaccatgcgtcaaggcgctccgagctgcgcgcgaagcagtacgcggctcccagcaggaacggcaccgtcggcagaacgggaagcaccgcccccagcgccccaagcccgaagcaggcgaagcccccgaccgcccacagggcgcgaaggcacctggccgcgcgccggtctctctcgttcgtcatgagcatccttcccagcgccgacgccctgcgccggcaaatagttacctttgtctaacaaggtgggaattgtacgcgaactggattaaattgtaaaccttggttaatttttagcgacggttcaacgtgtgcagcatgctcaggccccgcagggtgagatgctcgtcggtacgggcgacgcgctgcgacagcgcggcgatggcagcggcatccgagcccgtggcgatgacgtcggtctcgtagcccagttcgcgccataccatgtcgatgaggccgtcgatgagcgcgacctcccccatcacgacgcccgcctgcatggcctcgcgcgtgttcttgcccaccaccgatgccggggccttgagatcgaccatcgccagctgcgcggcggcatccgacagcgccttcgccgacagcttcacgccgggcgcgatgatgccgcccacgaacgagccgccctcgtcaaccacctcgaagttcgtcgtcgtgcccagatccaccacgatgaagggcgccgtataggccgtgcgggcggcaacgaggtcggctacccggtcggctcccagctcgccggggtcgttgtagcgcatcttcacgcccgtcttcacgccgggtcccaccacgagggggcgtcggccggtaagcgcgcgcgtcgcggtcacccatgcatccgtgagccccggcaccaccgacgcgatgacggcatcgtcgcagatcgcacgacggccgtcgcgctccagcatgtcgaacagccccgccatccgcatgcgcgcctcgtcggccgtcatgcgctccgtcgtggtcaccttccaggtggcttccagctcgccgccgacgaagaggcccaggttcgtatccgagttccccacgtccacgcatagcaccgtgcgcgctgcgtcccttccgttgtccatagcctcccgcccttcccgaattgccacaatcatgcgaatttagcgatgccgctcgcccttttcgtccagtatactgtacccgtccgttcagtaacccgacttcctaaaacgtgaggggaagcggatatacgcaaaggagaagagaatggattctgtcaaagggcagctgacgctgcgcggcatcgtcataggctgcgtcggttgcgccatcatcaccgcggcatcggtgtacacggccctcaagatgggggcgcttccttggcccatcgtgttcgcggccatcatctcgctgttcttcctcaaggccctcgggcacggcaaggccagcctcaacgaggcgaacgtcacgcacaccgtgatgagcgccggcgccatggtggcgggcggcctggccttcaccatccccggcatctggatgctgggctacgccgacgaggtgggctggttcgagatgctcctcgtagccgtctcgggcgtcatcatgggcctcgtctgcaccgcgcttctgcgccgccacttcatcgaggactccgagctggagtaccccatcggcgaagcggccgcccagacgctcatcgcgggcgattccggcggcaagaccggctggaagctgttcggctccatgggcttcgcgggcgcgttcacggcgttgcgcgatttcttcggcgtgatccccgcgatgctcttcggcaacgccgcggtccccggcgttgcgttcggcatctacctgtcgccgatgcttctggccgtgggcttcctcgtgggcacgggcgccgtcgtcgtgtggttcgtcggagcgctgctggcgaacttcggcatcatcgtgggcggctcggccgcgggactctgggacgtggcgtccgcgcagggcatcgtgtccagcctcggtatgggcgtcatgatgggcgcgggcctgggcgtcatcttcaagaacatcctgcccaaggcctggcgcatgctgcgcgacgcccgcagctcgaacgcgttcggcctcaccgccgcaagcaccatggatgcgcccgcaagcggcgctaaggacggacggctgcgcatcggcagcttccgcctcaccgccgggctggccgcgctcgccgtggccgccgtcgcgctcatcgtctgcttcggcctgcagctgggccccgtcccggccgtcatcgtggtgctgctcgccttcgtcgccacggccatgagcgcgcagagcgtcggccagacgggcatcgaccccatggagatattcggcctcatcgtgcttttggccgtggcggccgtatccagcgtgccgcaggtgcagcttttcttcgtcgcgggcatcgtggccgtggcgtgcgggctggccggcgacgtgatgaacgacttccacgccggccacgtgctgggcaccagccccaaggcgcagtggatcggccaggccatcggcgccgtgctgggcgccttggtggccgtcgccgtcatggcgatcctcgtgagcgcgtacggccccgagtcgttcggccccacggcgtcgttcgtgtccgcgcaggcgtccgtcgtggccaccatggtgtcgggcatcccctcggtgccggcgttcgccatcgggcttgcggcgggattcgtcctctacctgctgaacttccccgccatgatgctggggctgggcatctacctgcccttctacatgtcgctgaccgcgtttctgggagccatggccaaagtcgcctacgacgccgtgtgcaagctgcgccgcaaggggctctcgcccgaggcggccgcggagaaggagaaggcccagggcgaaacgggcctcgtggtgtcgtccggcctgctgggcggcgaatccatcgtaggcgtcctggtggcgctcgccgccgtggcgacgggcctgggagcgtaacgcattcgcacaggcgtcccgttgtcgcccgaaagccgcggttttcccttgaaaacgaggctttcgggcgacaacgggcgcggcgcaggacgcatgcggaacggcgagcttcccgttccgcatgcacgctagttgaacttgaagatcttctgagccatacgatagccggtgatgccgatgcggcgaccgaacgaggtaggcaggttcgtgcccatgttgagcgtgctgcgccggatgggacggtaggcgtccggattgtgcgctttgaggtactcccagatggcctcgcgcttgtcctctgcctcgtcggtgtcgatcatgcgcaggaagatggagcagatgcacatcatcatggacaggtagttctccatgtagcgctccaggcgcttctcgggcacatcgtcgggcaggcgcacggcatcgatcatctcgcgcgtcacgcgcagctgctggtcgatgcgacccatcatgacgttctcgttcacgctctgatcttcgcgcccgatgaagtagcggtacatgtccacgtcacggtagtagatggtcttcacatgcggaagaggaacgtacacgaagatgttgtccacgtagaagcaatgctcgggcagcttgagatcgatgtcccgcaaaagatcggtacgatagatcaccgagtgcatgagcaggtactggctttgcccgaaatggcccacgtcggcccagccgaactcgcgcccctcgggaaacacgttacggtagtgcatgaccgtgcgcgcgccctcgtgaaccttctcgtacacgtagttgccgatgacgagatcggttggatgcggcagttcggcctgacggcgcaggtaaaccatgatctcggccatggcgtgctcgtcgagccagtcatcggagtccaccaccttgaagtagcggcccgtcgcgttcgccaatcccatgttcaccgccgatccatgaccgccgttttccttatggatggcgcggatcaaaccggggtgacgctcctgccacgcatcggccttggcggccgtgtcgtccttcgtggatccgtcgtcgacgatgagtatctcgatgtcgtccccgcatttcaaaatcgactcgatgcaggtatccatgtaggcggccgagttgtagcacggcacggcgaaggagatggtcttcatgccgctaccccaccagctcgtcggcgagcgccagcgcacggccgatgatgacgtccatgttgtagtagcggtactcggccagacggcccagcggatggaagttcggaagcgacgtggtgagcgcgcggtagcgctcgtagtgcgcggcgttctcgtcgttgatgatggcgtagtacgggatctgcttcttcggatcgtcgtaggagtggctgtactccttcatgatggtggtcttgtcgcttacctggccggtgaggtacttgaactcggtgatgcgcgtgtaatcctcggtcaccgtgaagttcaccgttccgcaaggcagcacgtgctcgacgtcgtgcgtctcgtacacgaaatcgaggctgcggtacggcagtcggccgaaacgcgacaggaacagctcgtcgagcggcccggtgtagacgatgggcccctcgaacggcgcgcccttgatgagaatggcggacagaggcgcgttctcgtcgttgctctcgaactccagttcgaacacgttctcggcttcggtttccaggcacaccatgatgcgctcgtggtcgagcatgcgctcgaacagcggggtgtagccctcgagcggcatgccctggtaggcgtcttggaagtagcggttgtcgcgcgacaggaacacgggcacgcgcgccgtcaccgacggatccacctcctccggcgtgagcccccactgcttctgcgtgtagtagaggaacacgttcttgtagatgaagtccgccacctcggtgagatcggggtcgtcgacgctccgcagctcggtgatggtcaccttgcgctcgtcgccgaacgtggcgatgagcttctcgatgagctgcgaggcgcgctcctcgccgaaggcgatctccatcgagttcttgttgaacggcaccggcatgtacgtgccgtaccagtcggccagcacctcgtgctggtagtcgcgccactcggtgaagcggcggacgtagtcgaacgcgcgcttgtcgttggtgtggaagatgtgcggcccatagcggtgcacgaggatgcccgcctcgtcggcctcgtcgtacatgttgccggcgatatggggcttcttctcgatcacgagaacacgcttgccgccgcgctctgccagctcgcgcgccatgacgctgccggcgaacccgctgcccaccaccacggcgtcgaaatcgcctcgatcgatgtcatgcaaatcgcagtaacgcacacccatggggaaccttccttgtccgtattgacccgcacgaaccgcgcggtcgcgatatcctagaaataaagcgcggtatttgccgcgccatagatgccgaacgctattttaccgggaaggctccgggttgcgtggattatcatacaaagcggataaaatggaagcgagcgacgacccgccgctgcagcatgcgaagagggcgtcgcgcgaatcgaaaggcctgccatgagttcattcctggaaacgatgctcgcccgcgccaaagcggatcgccagacgatcgtgctgcccgaaggcgacgacgagcgcaccctggcggcggccgagcgcatcttggccgacgacatcgccgacctcgtcatcctcggcgacgcccacgccatcgcggccagcccctacaagctcagcggtgcgcgcatcatcgacccgcgcacgtccgagctgcgcgaagggttcgctgaggcgctctacgagctgcgcaaggccaaggggatgacgcccgagcaggcgatgggcctcatggacgacgtgctgtacttcggcgtgatgatggtgaagaccggcggcgccgacggcatggtggccggcgcatgccatgccacgggcgacgtgctgcgcccctgcctgcagatcctcaagaccgcgccgggcgtgaagctggtcagctcgttcttcgtcatggtggtgcccgactgcgacctgggccaagaggggacgttcctgttctcggactgcggcctggaagtgcagcccgatgccgaaaagctcgcgcacatcgccgtgaactccgcgaagtcgtggaagacgctcatgggcaccgagcccgccgtggcgctgctgtcgcattcgacctacggctcggccaagaacgacgacgcggccaaagtggtcgaagcaacggccatcgcgaaggagctggcgcccggtctcgcgctcgacggcgagctgcagctggacgcggccatcgtcgagtccgtgggctcctcgaaggctcccgactcccccgtcgcaggcaaggccaacgtgctgatattccccgacctcgatgccggcaacatcggctacaagctggtgcagcgcctggcgaaggccgaagcctacggtccgatcacccaaggcatcgccgcccccgtgaacgacctttcccgcggctgcaccgccgacgacatcgtcggcgtcatcgccatcacctgcgtgcaggctcaagcgaagcaggcggagtaaggcggacgccgcctgcttgccaaacgacgaggcccccgcgttgaactgcgggggcctcgtcgtttacagcttcgtgcgtttacaccagcgggacgtccactttctcatggagaatctcgtaagtgtcgcgagcgatcatgtactcctcgttcgtggggatgatgatgatcttcaccggagagctctcggtggatatctcgcgctcgaagccgcgttggcggttcttctcctcgtcgaggatcatgccgagaggctgcaagcccgcgaagatcatgcggcgcatcttctcgcagttctcgccgacgccggccgtgagcacgatggcatccacgccgcccatgacggcgatgtactggccgatatacttcttcaccgagttcgagtacatgtcgtaggccagcatggcgcgctcgtgaccctgctcggaggcatccctcacgctgcgcaggtcgttcgagatgccggatatgcccagaagacccgatttcttgttcatgaggtcgttcatctcgcccgcagtcaggccctcgtgctccatcacgaacgggacgatggccgggtcgatggccccgcagcgcgtgcccatcataaggccgtcgagcggcgtgaggcccatggaggtgtccaccgccacaccatggtcgatggccgatatcgagcaaccgttgcccaggtggcacgtgatgagcttgaggtcctcgatcggctcgtccagcacggcggccgcgcgctcggagatgtagcggtgcgaggtgccgtgggcgccgtacttgcggatggcgtacttctcgtacagctcgtagggcaaggggtacatgtaagccttcggcggcagcgtctggaaaaacgacgtatcgaacacggcaaccatcggcgtgctcggcatgtgcttgaggcacgcgttgatgcccatgagcgccgccttgttgtgcagaggcgcgagctccgccagctcgtcgatcttctggatgacgtcgtcgtcgataagcaccgagcgatcgaagtacttgcctccctgcacgatgcgatggcctaccgcatcgatttcctcgagcgagtcgatggccttcgtcggcccgctcgtcagcgattcgaggacgagcgccatcgcatcgtcatgatcggccatcttggcatcgatgacctcttcgttcttatcgaggccgtgcttatggaacgcctcggccgaacctacccgctcgcagatgcccttcgcaagcagctcctgctgctccacgttgaccagctggtacttcaaggaagatgaccccgcattgatgactagtacgttcaacgacctgcctccttcggtattcctaaagcatatattctaaggtggcggcggaaagctccgcgggcaaacggaggcctgtatcggccagcggcgcgccgctcaccgaaaacaagcgtcgaggccgtctgccggacaacggcaagacgacctcgatcgaagcgtattcgcaggtcagaatattacttcgccgaaggatcgcccgagttcatgggagcgccgcccagcacgtgcacgtggatatgatgcacggactgctgcgcatcgtcgttcgtgttgacgatcacgcggtaaccgctctcggcgatgcccttgagctcggcgatcttcttcaccgtgttgaacagataacccatctcgtcgtcggggatgccgtctccgatgttgtcgtagtgattcttcggcacgatgagggtgtgcacgggcatctgcgggttcacgtcctcgaacgcgagcacgcggtcgtcctcgtacaccttcgccgaggggatctcccccgccacgatcttgcagaacaggcagtcttccttgcgcatatccttctccttctcgaaagccggttttccccgctaggacaagctggtgtcgcgcgcaccgtcgtcggcgtcggccacgagctcgcccatgagcacgtccactttctgctgagcctcagccagacggccttgcagcgccgcgagcagggccacgccgcgctcgtagcttctcaggctgtcttccagctccagcgaattgctttccagcactccgacgatgccgtccagctcggccatggcctcgcgaaacgtcagctcctcgatgggcctgagttcggtgttctccgtcatgatgcatcctcccaatcgatgatttcggtgtccacgcgcctggcttgctccacccggcaggcgagcacgccgtccgcgacggcgacgtccacggccgtgccaggcggcgcggcctccacgctcttgaccacggcgccgtcttccgtgcgcgcgatggcgtagccgcgccccagcacggcaagcggcgacaggtcgtgcagacgcgcggcggcaagcgccgcctgttgcccgaagcgcggcacgagagcgccgccgcacgacgccaggcgctcgcgctcgtgctcgagacgcgtgcggctgcgatcgaggctggctggcaacgcgcaggccaagcgctcgcgctgacgcgcgaccgaagcctcgtcgcgcgccaggttcgcgggcagcgcccggaacagacgatcggaggccaggtcgagcatctgagcctcggtggcgtacagaagctgcgcgtcgcagaacagcggacgcgtagcgcagcgccgcacctcggccccggcgcggtcgagcgcccgggacatgctggcgcgcagcgacgacgaacgcgcctcgaacaagcggccgagactctcgcgggcggggcttacggcttcggcggcggccgtgggcgtagaggcgcgcaggtcggccaccatgtcggcgatggacgtgtcgggctcgtggccgatgccggtgaccaccggcacggggcacttcgcgatcatgcgcgccagcccctcgtcgttgaagggcatgagatcctcgaacgacccgccgccgcgcaccacgagcaccacctcggccccggcgcgcacgaccgcgcgcatgccctcaacgatgccggcgggcgcgttcgagccctcgaccgccacgcccgcgacgagcacgcgagccagcgggaaccggcggcgcagtgtgcgcagcacgtcgtgaacggccgcgccccgcggcgaggtgaccagtccgacgagcgccggatacgcaggcaccggccgtttgcgagccggcgccataaggccctcggcttccagcttgcgcgcgaggttcgccacctgcatgcgcaggttaccctctccggccagcgcgatggaaaacacgtcgaaattcatgcggcccttcggtgcgtacagcgtgaaacgcccggtcagttccacgagctggcccacggccaaccgcacgccggacgcttggaaacggttgttccacatcatgcacggcaacgcggcgtgctggtccttcacggtgaagtacacggctttgtagccgggcttgttcgagacctcggacacttcgcccacgagcctcacggtcacgccctcgagcgctcccttcgccaacgccatcgcgcccgacaccgacagcgcatccggcgaccccccgccctcggagcgcgtcgccgcgcgagcccgctcaagcgcggcgccgaggccgtcttggcgcgccgtctccccgtaccccatggctcgccgctagtcccggcgctggccgagcagccacagcagctgcaggatggaggtgagggcggccgccacgtaggtgagggcgcaggcgcgcagcacgttgaacgagcccgcctgctcggcctggggcaggcccgtcgtgttcatgtaggccatcgcgcgctgcgaggcgttgaactccaccggcagcgtgaccagctggaagatgaccaccgcggcgtacatgacgatggcggccgtggtgaggccggcgatgttcaggaagatgcccatcatcaacaggaagatccacgcattcgacgccaggttcaccacaggcaccagcgcgccgcggatcttcatgggagcgtagccttgcgcgtactggcaggcgtggcccacctcgtggcacgccgtggccgtggccgtgatggagcgcccggcgtaggcgtcgggcgacagcgtgacggagttcgtccgcgggtcgaagaagtcttggccgggaccgccgcgatgcacctcgacgtcgccgatgccgtagtacatgagcatgcggcgcgcagcctcggcgccggtgaggcccgtggatatgggcacgtgcgtgtatttcttaagctgggagttcacgtaccaggttgcaaggccgccgatggccagcgtgacgacgatcagcagcaggtatccgttgctcaatccgaacatgggtgtaacactccttcagaaggttgcatgcgcgaacgctctcgtccgcatcgttttcgttccccgctattctataatgaaacagatgatcgcctcgaaaccgtcatggattcagcgcgaaagattcgtaactgacggcgccgagacgccggaggcgctcaactccgatgctccacgcgcagctcggagccgtcgatgctgagcgcgagcctgccttccagaagctccagcagctcctctcccacgagcgcacgacgccaaccgcgcagaagatcgacgccctcgcggtacccgcgcgcgacgcgcgccaggtcgtcatggctggccagcgtggggaacgccacgccgttctgcttcgcgcgcagccgcacgagcgcgcacatgagatccagctccgcgtcgacgttcggctcgttcttgccgcagcgatcaggctctggccaggtgtcgggagacgcgtccaacgcggacgcgatcagcgacaccacggtgcgcgcgtccttcgtggagaggcggtcggacagcccgcgcaccatgaacaggtcgtcgatggaacggggctcgcgcttgcaggcctccacgatctgctcgtcggtgaccacccacttgcggggcacgtcgcgtcgctgcgcttcaagctcgcgccaggccgctacctcgcgcgcggccgacagctgacggcgcgacagctgggacacgcgcttgagccgcttgtagcgctcgcgctcgttggcggcgtagcgcgccggatccgccaaatcctcgaagtcgcgatcgagccatgacagtcgccccagctccacgagctgcgcccgcatgcgctcgtacatgcgcggcagatacaccacgtcgtcggccgcgtactccaactgcgaatcggacagcggacgacgcgaccaatcggtgaacgagtcgattttcttcagcgtcacgccgcactcggcatgcacgagcgccgcgtagccgatctgctgcgtatggcccaggagcgcggcggccacctgcgtgtcgaacaggggatgcggcagcacgcccacctcacgcagcaggatctccagatcctggttgcctgcatggaacagcttcatgacgttctcgttgcgcagcacgggcgcgagcaccttcagatcgtcgacggcgaacggatcgacgatggccgtctcatcgtcggtcgcgagctggatcaggcatagcttcgcatagtaggtcttctcgcgcagaaactccgtatcgatggccagcacgctggaatgcatggcgcgctccgcgaacgccgcgaggttttcttggtttgctatgtacacccggtgttccttaccttgtgtttctcggttcatgttgtaccatgccatcatagcaaacgatcggaaagggaaccggtgaaactgctcgtcatcaacaacctctcctccggcttcggcgaaggagccgtgtacgacttcgtacgctcgttcatgcaggacggcgacgaggcgtgcttgcgctcgacggacggaaccaccggagtgagcacccttctggacgacgccgcgtcgttcgacgccgtcatcgcaagcggcggcgacggcaccgtggccacggtcagctacatgctcgccgactcgggcatccccgtcctgcccttcccagccggcaccgcgaacctgcttgcgctcaacttggcctcccccatggagccccacgcgctggcgaagatggtgcgcgagggccgcacgctcgacttcgacctcggcgagatcgaagtcgaaggccgcaagttcggcttcggcatcatggcgggtgcgggctacgacgcggccatcatgcacggcgccgaagcgggcaagcgcctgttcggtcccatggcctacctatcggcggccatcgcgaaccccatgccgcagaaatcgcatttcatcctcgacctcgatggcgagcgcctggagagcgacgggcttggcatcttgctcgtgaatttctcgaagatccagttcgacatcacggtaacgcacgacaacgagccgcgagacggcgagttcaacgtggtggtgctcaaggcgaaaaccgccttcgagctgattccggcggtgctggccggcctcctcgaccgcggcggcgactttcccgaccgcacgggcgcgctggaaatccaccgggcacgcacggtgcgcgtggaagccgacccgcccatggaggtgcagtacgacggcgaggcgacgcgcctcatgaccccgttctcggcgcgcatcctgccgcgcgcggcgcgcttcttcgtgagcgaggaaggctacgacctgttcgccgtcgaatagggaactgtccgacgaggatcgccttcgtccgacatcgacgaacaggcatcaaaccgaacggaaaggggcctgcaggtccctttccgacaagcgctacttcccttccggaacctcgtaggacggatcttccgatgcggggacgtcttccacctgcgcgccgatctcgagcggttggccgaacgcagcgttcgccgtgtcggaagtcgccatcagctccttgaacgacgcggcgtcctctcccgccatgggcatcatgacgtacacgttgtttccgatgatgaccggcgtgatgcgctcgggacgagcgtccgaaacgccggacgcgtccgcgtcttgcggccgggcgtcctcgcgcttcatctgctccatcatctcggcgcgcacgctgtcgatctgcgcggcagtctcgttcttccaacgatccttgcgccacgcgaggaagttggcgttgtagcgcatctggatgagctcgagcacgatgcagaacaccatggcgaagtacacgatcagcttctcgagcggcatatgcagaagctcgatgccggtatggaagcccgcgctgtcgatgaccagcaggccgccgatggccacgatgaacgtgagcgcgagcatcttcatctcggggtggccgttgatgaagttcgagatggggtcgatgaagatcatcatgaggaacacggccagcatgacggcgatgatcatgatgatgaggtggtcggccatgcccacggccgtgatgaccgagtcgatggaaaagacgagatccatgaccatgatggtgcccacggcctgcggcagcgcgatacggtgcagcgccttgtgctcctcgcagtgctcggctttgagctcggtcagcttgagcgtgtcgcgcagctcggcgatacccttgtatataaggtagccgccgccgacgagcagcacgaggtcgcgcaccgagaatccgtgcgcgtaaggcccgaggtcgatggtgaacagcggcgtggtcatatgcacgaggaacgacgcgaaacataggaagatgattcgcatgaccagggcgccggccaggccgagcttacggcctatgtgctgcttgtcctcgggcaggcggttcgtcgtgatcgatatgaacaccaggttgtccacgccgagcacgatttccaggaagatgaggctgaccaggctgatccatgcctcaggtgacgcgaagattgataggtccacgggttgcaagctccttcttcgagttcctcgtctgttccgcgcgggggacgtccataaaaaaagactcatggcgcggccgcatgagagcggaccgcgccatgagtctcgttatttaagacacgccaggcctttcggccatgatgttgatcgtgccgcttgcgctttcgaaacgcaagccaactactcccccacgggcgtctggtatcctaccacgacgcaggaactccataatgaccgaaaccgtaattcaacacaacgcgtacatatcgcgttgtcgcaggcgcttgcacgcggggcgcggcgggcaatgctataatgcgcagagcgcaacgtgggttgcgcgccgatcatgcacatcgtcgcaggagacgcaatgctattcaaatcacgcagaaacgaatacgcggacacggacggccccgtgcgctatctggatgacagcggccttcgtcgcccgctcgacatgccgaggccgcaaatcgccatcatgttcgccttcgtcctggtcgcagcccttatcggcggctacctgctgttcaacgtcctagacgcggtgaggggcggcacggctcgcgcgcaagccagcgtcgaggagaacctgtcgcgcgaggtgtcctacgacctgccggcgctcacatcctacatcacgctgaacgacgacgagatcaagcaggccgtcgccgatgcaggccttaccgtcatcgacaagggaggcatgtcggacgatccggaagccgccctcgagctgatcaagcttccgtccgacgtgagcgaactcgacgcgggactgatgtacaacaaaggcgtgtccaagctttccgcaagcgaggcggccttgctgctcaacggttcgtggacgctcgacgccgaccgcagcgacggcacgtccatgcgactgcgctacgccgatttctcttcgggcagcctcgatgccgccattgacgccgccatcgccgccgagggcttcgatccggccaccatcgccgaggacggcatgggcgtggacgaagtgggcaacacgttcaagcagggcacggtcgacgtcgacgggaccgcgtacacatggaaggtctcggctctccctttgtccgagatgtacgacatctcgggcctgcccgaaaccgccgtgtacgtcggcgttcgcttgagctcctagccgcacgcttctatcctcgcattcgagcattcgcgccccgcatcgctttcgacgatgcggggcgctttgtttctccacctcaatattattcttttctaaaaacagtataaaacccttgccccgcgtcgggtttatcctcacgcgccctcggatataccccgataggcatatgacctgctcgagcgcatgatacggagcaaggaagaggagatttcatgaaagtatcgagcgtcatagcgggtgcatcggcagccttggtggcattccaggcggcgctctacgcctcccatggcgaagccgatctgctgcggccccccggagcgcatggcgagaaagacttcgcttcgcgctgcgtcaagtgcgggaaatgcatggaggcctgcccctatatcgctatcaagccggcacgcgacgacgcaggagccgccgtgggaacgccgatgatcgatgcgcgcgcccaggcctgccgcctatgcgaggattttccctgcgtcgaggcctgtcccacgaacgcgctgcgcgacatcgaaacccgctccgacgtgaagatgggcgtcgccgtcatcgatgaggatctatgcatcgcgttccagggcatgcgctgcgaagtatgctaccgcacctgccctctcatcgacgaagctatcgtcatcgactaccgcctgcgcgaaggcgatgccatccactccgtgttcgcccccgtcatcgacgaggacaagtgcgtgggatgcggcctatgcgtggaacgttgcgtggtcagcgagccccgcgtggccatccgcatcgcaagcgacgaggagcgggcgggcggcatcgagccctcggcatgacgagctcggcgcagctgcgccgagctcccctgaacaagctgccaaaccgttggaggtttaggacatagcaatgggtaacgggaggaaaaggagggatgtcatggacatctcaagacgaggattcgtcaaggccacggcagtagcgctggcgagcgcggcggcggcaggcaccatgtcgtcgctcgtgggatgcgcaagcggcgaaggccaatcgacgaccgccgcttcgggcgacggacagaagtacacgtcggtgtgccgcttctgcggctgcggttgcggcgtcatctgcgaggtcaaggacaacaagctgatcagcgtgacaggcgacccggacaacgagtccaacaagggtctcaactgcgtcaaaggctactacttggcgaagatcatgtacggcgacgaccgcctgaccacgccgatgatccgcgaggacaagtccacgaagggcaccggcgaaggtttgcgcgaggcgagctgggacgaagctctcgacctcgtgtcctccaagctcaaagagacgtggaagagcgacaagtcgcgcctggccttctggctgagcggccagcagcccatcaccgaaggctacgcctgcgccaagttcatcaaagccggtcttctctcgaacaacgtcgacccgaacgcgcgcctgtgcatggccagcgccgtggtggcgttcatgaacgtgttccaaaccgacgagcccgccggatcatacagcgacctcgacgaagccgacgtgttcgtcacctggggcgccaacatggccgaagcgcaccccatgctgtactcgcgcctgacggcccgcaagctctcgggcgagggcgtgaagcactacgatctcggcaccatcagaacgcgcacgagcgcgagcgccgacaagacgatgatcttccatccgaacaccgacctcgccatcgcgaactgcatcgcaaactacctcgtgtcggagaagaagtacgacgaggccttcgtgaacgaccacctgcagttcaagcagggcaccgaggacatcggcaactccttcgaggacggctacgacaagagcgagatcggctcgaaggtggacgcggtgagccctatcaccttcgaggagtacgccgcgcgcctggaaccctacaccttcgagtacacctctcagctctccggcgtggccgtcgaggacctcaaggagctggccgaggtgttcgcggatccgaacaagaaggtcatgtcgctgtggaccatgggcgtgaaccagcacaaccgcggcacatggatgaaccattgcatttacaacgtccacctgctgtccggcaagatcgcccagcccggctgcggccccttctcgctgaccgggcagcccaccgcctgcggcaccgcccgcgaagtgggcacgttcagccaccgcctgccggccgacctcttggtggcaaacgagcagcaccgccgctacaccgaggctatctgggatctcccgcaaggctacctcgacgagatcaaggctcccggcatgcacacggtgaagatgttccgcgagctttccaagggcaacatcgacttcatgtggtccgcccataacaattgggcgcagtccatgccgaacctcacccgtttccttggcgaaggcgctgacaacaagggcatcttcgacacgttcatcgtggtcaacgaggtgtatcccaccctgtccacgcagtacgccgacgtcgtgctccccgtggcgctgtgggtggagcgagagggccagttcggcaacgccgagcgccgcaccgccgtcttcgagaaggccgtggacgctccgggcgaggccaagtgggacctctggacgttcatggaagtagcgcatcgcgtgctcgacggcgagaagatcggcagcgaggatgccttcgaccacctgttcggcttcatctacgacaagaacgcccgcgatttcaagaacgacgaccgcgagacgaaccgcctgctgtgggaggagtaccgcatcttctcgaaccccgagatgaacgacaaggccaaggctatcaacgacgataccgacggcacgttcggcgccaagctcaaaatggaggcaaagcagctggccccctacgaggagtaccttgccaaccacggcatgacgtggccggtgcgcaacgtgaacggcacctggaagtccacgaagtggcgcttcgccgagggctcgcaggacgagggcttcgacgaggtcggcgtgaagcagtacggcaagcccggacaggccggcggcgtgagcttctacaagtccgccaacctgaagccgtccgtggtgttccgcccctacgaaccgcccgcgcagacccccagcgacgagtacccgttctacttcgtcacgggtcgcttgctggagcactggcacaccggcacgatgacccgtcgcgtgcccgagctcgaccgcgcgctgcccgaggcgctgctgaacatgaacccggacgattgcaagaagctgggcatccaggacggagacatggtgaaggtgaagtcgacgtacggcgagttcgacatcaaggtgtccacggcgggccgcaccgagcccccggccggcgtgacgttcgctccgttcttcgccgaggagaccctggtgaacctggcggtgcaggacgtgtactgcccgctgtccaaggaacccgactacaagaagacctgcgtatccattacgaagctctaaggggaagacgatgaagaagcacatgataaccgccgccctcgtggccgtgatggcgctgggcttgggcacggttgcaggctgcagccaggaagcccccagggaagacgtgaacgcgaacgtgcccgccggcgctccgcctttgatgccgacgagccacgacgggcgcttcgaaaacctcggcgcggcgggctgttacggctgccacggcgcgaacgaccaggccaaccccatgctggccgacgcaaccgccctgcccgccgaccactacgcgggcggcgacgcgggttccttggaaatggacccgacgcacgagcagtgcatcacctgccacgcgcaggcgtaagagatacgtgcctacccggcggacggagcgtcgcgcgtccgccctccctcctcgccccgccccctccttccaagggggcgggccctcggaggataagaagaacgaacgtgaggaacccatcatggttatttcgagtttggtcgtggaaacgatgcccgatcgcaccgacgacgtggcccgggagctggcgcagcgcgaaggcgtcgaggtgcacgagacgaacgggcacaagatcgtcgtcaccatcgaggccgacaccgtggacgactcgcacgacatcgcgagcggcttcatcggcatcgaaggcgtgaccggcatcaacctcgtgtacgctaacttcgaggacgatcccacgctggccgaggccggtacgcgatgagcgaagcttcggacacgcggcgcgcgtttcgctggtcctggctgcgccatgccgtgcaggcggcggctctcgtgctgttcgccgccccggtgcttgcggccggatggagcctgttcggaacgtccgtcggcggcgacgacgccgcggcgacccccgcccagcttcccttcttcggcagcctgtcctcctcgtccatcgggggtctcgacatcctcgaccccttcggcgctctgcaggtcatcgccgcctccaaaacgttcgagctcgattggctgctggccgcgctgccggtgctcatcgtgtacgggctgatccgaggccgggcgttctgcggatgggtgtgcccggtgaacctgctcctcgagatcgtggacttcgctcgccgcaagctgcgcatcgacgtgcgcgagatgccggtgccgcgccatgcgaagctgtggatcgcccttgccgtgctgggcctgtcagcgctgaccggtgtgccggtgttcgaggcattctcgcccataagcgccgtcaacaagggcatcctcttcggtgccgtgacaggcgtttgggtgctgctggccatcgtgctgacggaactgttctggggctatcgcgtgtggtgccgctcgctgtgcccgctgggcggcttctacgaggcgcttggccgattcggccaggtaaacgtgaagatcgatcccgcagcctgcattcactgcgacgcgtgcaagcatgcatgcctgtccgatcccgcgatcctcgagccagcgctcgacggatgcgacgcgatcgtgcgggccggcgactgcatggcctgcggttcgtgcatcgacgcctgccccacgcgcgccctgtcgttcaccctgggacgcgcctccaagccggccgccccgaacggcgaggaatgacccggtgcggcctctggtgcatcgcgcggcttcgcgatgcaccagaggccgcacctttcgcgcgcgccgccttcccctttacacgttcagcagcttgtgcctgagggcgtagtccaccaaatcggcgcgggtcttcaggcccagcttctggtatatcttcgaacggtgggcctccaccgtcttgaccgagaggaatatctgctcggatatctccttgttcgtgaagcccttggccagaagctggaggatctccagctcgcggttcgagagctgctggtaggagcgatcctcttcctctcctccggccacaagctgcttggtgagcatggccgtcatcttcggatggatgtagctgccgccctcggccaccgcatgaacggcggcgatcagctcttctgacgtcgagttcttcagcacgtagcccgccgctcccccgcgtagcgtgtagaagaggtactccggttcggcgaacatcgtgaggatgaccaccttcgtgccggggaagtccttcgcgatcttctcgcaggccaccagcccgctctgccccgggggcatggagatgtccatgagcaggatgtccggtttctcgcgcgccacgatggcgtaagcctgcgcgccgtcggctgcctcggccaccacccgcacgtcggggtcctgctcgagtatcatcctgaaacccacgcgtaccacttcgtggtcgtccgccagcattactctgatcatgcgcccgcctccttgccttccgccacgtgcatcggcgcaaccagcgtcatcttcgtgccatgctcgtcggattccatcgcgagccgggcgccgatgacgctcgcgcgctcctgcatgcctacgagaccgcagccgctccccttgatctccggctgctcggtgtcgaagccgcatccgtggtcgatcacgctcacatgcagccatccggccgaatcctcgagccggacgatcaccttctcggaacccgagtacttgcaggcgttcaggatggcctcctggcagatgcggtacgcctgcgtctcgagagcctgatcgaagcgatcgcacgacaggctgccctcgaacacgatctcgttgccgtacgtgcgctcgaacacggcagcctgcgagcgcagagccgcaacgaaaccaagatggtcgagagccgaaggtcgcagctgcaccgacaggttgtgcagctcgtcaagcacgttggcaagatcgttgttcgcttccgccagcagctcgtagccctcttcgtcaacatgcgcgacaaggcgcttgaacacgaacgacagcgtcagcagctcctgcgctatgccgtcgtgcagctcgcgcgagatgcgcttgcgctcgtcctcctgagcggcgatgacgcgcgcaagctccgagcggatgaagatagggttcttctgatcgtcggcgcgtttctccaccgcgattctttcgaaatccatgaagtcgtcggaaacgacgtccaaatcgcacaaggtgccgtccagatcgtcgatgacctggcggtacgccgcttcgtgccgatcgctcaccgtgcggaacgcgcacagcagcacggcgaccacgcgcccgtcgcgcgtgagcggcaacgcgcagaagctatgcagatcctcggcgaacacgatagggtacgacgagtactcgcgcgggtcgatctcctcgtcgatgttcgtgaacatcatgggcttgcccgccttgatggtgatgccgccgatgccgtgccccggtgccagcacgatgcggcgatggcgctcgccggtagcgcctgcgctgtatatccacttgagcggcgcgccgatgaacgccgtcaacccgatagacacgaaatcgaacccgtaccgatctttgatgtcgttcaccgcacgcgcgtacttctcgcacgcgcccgccagctctcgctcgctgaaattggacgctcccaccgcgtctcccccgttcccgttgccgatccgctcgttcgctcgtcgacggtctattatcccctacttcgctcgtatttgcacggggcggcttgccgaacgcctcgacgacgcgcataatccgccatgcggcacgctcccgcggtccctgcttccctgatcagacgctcgttctcgtcggtgatgccgccgagcgcgaacacgggcgcatgcgcgcgatccagcacggcgcgcaggaagggcaaccctcgcgccgtggacgccggcttacacgaaggcgcgaacacggggctcgcgacgagaacgtcggctcccagaacctcggcctcggccacctcgtcggcctcgtggacgttcgtacccacccacgcgaacccgtcgggacggccctgcgcgcgcagcagcggcagcggcaggtgcacggcggcgcaaccgaggcggcgcgccgcctccacgtgcgcgtgcgcgacgaaggcgatgccgcagcgcgcgcagacggcggccatctccgctgcgagaagttcgtaggcggcatcgtcgaggtccttctcgcgcaggatgaccgcgtcgatggcgcccgactccgcgaggaacgccgtctgctgcggcaacgggagagcgcagccgaggcggtcggtgacgaacacgcgccgaaacgtcggggccgccgccgagggctcacaggcgaacatagtcgttcatcaccggctcgagaccgacgccgcgcagcgcggcgcgcacctgcgccacgtcgcggccgtcggcgatctcgaactggtcgtcgcccgcaggcgatccgtccgcatgctcgccgacgcccgtggacacgccggccgatatcttcgtggcggcgatgcccatggcccggtcgcggaagcccgcgcgctcgcgcgacgagatggtgatgcccgcctgcggcagcagaagacggtaagcgcacatcacctgcagaagctgtcgctcgcccacgccgcgcggccccagcgacccgttcccggcgatgggacgcagacgggggcacgacagcgacagctcggcgtgcgggtaagcgcgctgcacgagccatgcgtgcagcccgcatgcgtacgcgtcgcgccggaagtcgccgagacccaagagggcgccgaacgccgcgccccgcatgccgcctctcatcgcgcgctcctgagcgttcgcacggtacgggaacacccgcttgcgccccgccaggtgcagcttgccgtaaagcgcggggtcgtacgtctcctggaacaccgtgacgtaatcgacgccgcatccgtgcaggtaggcgtattcgtcctcgttcatggggtacacttccacgcccaccatgcggaagcgctcggcggccagcttgcacgcctcgccgatgtaggcggggtcggtgcgctcgcgatcctcgcccgtgagcagcaggatctcctcgagccccgtcgccgcgatggcgtcgagctcggcggcgatgcccgcgcggtcgagacgggcgcgacatatgtcgttgtcgcggttgaagccgcagtacacgcagtggttgtcgcagtagttcgcaaggtacagcggcgtgaacaggtacgcggtgctgccgaaccaacgccgccgcgcgcggcgggcggcggcggccagctcctccagcaacggctcggcggcaggcgacagcagcgcgccgaagccctcgggggaaaggcggtcggccgcgagcgcggcgcgcacgtcggcctcggtcgccgcgtcgaagtcgaacgccgccgcgcgtgccaacagttcgtcgagcacgggcgagtcggtgacgtccatatccggaaggtaggccatagggtcgatgccgcgatcgcgcgccacgtcggcggggtccaccgcctcgaggcgcgtgaagtgcggaaccgccgagggcgttgcggagcgggtgcctgcttgcgtcatggcccctcctaatccgcgaggaacccggtgaggggcgacgaggcctcggcgcggtcgagcacgcgccccatgccggctcggtatcccgcgcgccccgcctccacggcgcgtttgaacgcggccgccatgagggggacgtcgcccgccgtggccaccgcggtgttcgccatgaccgcggccgcgcccagctccatggcctcgcacgcctgggagggccggccgatgcccgcgtccacgatgacgggcacgtccacctcgtcgacgatgatcttgatgaagtcgcgggcggccaaccccttgttcgacccgatgggcgccgccagcggcatgacggccgccgcgcccgcgcgtaccaggtcgcgcgcgcagacgaggtcggggaacatgtagggcagcacgacgaagccctcctcggccagttgcgccgttgcgcgcaccgtctcggcgttgtcgggcatgagataggccgcatcgcggatgacctccaccttcacgaagtcgccgcatcccatcgcccgcgccagccgcgcgatgcgcaccgcctcgtcggccgtgcgcgcccccgatgtgttcggcagcagcgtcacgccctcgggaatggcgtcgaggatgcttccgtcctgccccgtgttcgcgcgacgcacagccaaggtgacgatctcggcgcccgcatcgcgcacggccgcctccacgaggtcgaggttgaacttccccgaccccaggatgaagcgcgaggtgaacgtccggtcgcccagcgaccaagtatccggttcgtatgccatggatatcccttcccgaccgccctctgcggcccgttgcttccgtcagtttccttcgagtcccagcacgaggcgcacgacgacgagcgcctgctgcgccgcgcacagggccacccgcggggcgaacagcgcctcgtcggccacgtcggcctcgccgtcgccgcacacgaacagccgccgccccacgcgccgcgtgaccagcgcgtcggccggtcccgcacccgccatgccgctgcccgccaccaccacggtattcgacgcctccgtcagcagcgcgttcacgaggtcggctttgcagcgggggtcgtcgaaggcctcgcacacgatgcgctcgcccgcgaacagcgccgccacgttgccggcatccacccgcacgcggtcgagcgtaagctcgatgcccgggtcgatgcgccgcagctgctcggccagcgcctcggtcttcggccggccgagatgctcgcggaagtagtgctggcggttgaggttggactcgtccacgaggtcgaagtccacgaggtgcagcgcgcccacccccgagcgcgccagcatcacggcgatgtgcgaccccaggccgcccagccccgccacgcccacgcgcgccgccgccagcctcgcgcgcgcctcttctccgatgcggctcgaaagcgcgtccatcagccgcctcccacgaagcggaccacttccagcacgtcgcctgcccgcagcaccgtggccgcgtacgcgtcgcgcggcacgatggccccgttcagctcgcacgccacgcgcgcggcgtcgaagccgtcgcgctccagcagctgcgcgagcgtcgaaccgtccgcctcgggccgcgcccgtccgttcacctgcgccacgtctcaccctcctttccgcccccgccggcgcagccgccggcctccgggcacgaaaaaagcgcgcacgaagcagatcgcacccgaggtggtgcgccccttcgtacgcgcttgcgtactctcacgacggctaggatatccgaagtcgcccgtccccgcaacgccccgccggtaagcggcgggcgcaagatgcagcgggatcgggcgcaaagcggctgcccgatggcgcatcatcgcccgaaaaacacgctttcgcgctcgattccgtgtttttcgggcgatgatgcgcatgcgcgctgtcagcaacacagccgccatgccgcgcaaacgagcggatagagaaccgttgcgccgccgcaaccgaccggccgacgccctgcggtacgctgaacggaccaaggcaaccgacgatcagataaggagacgtccatgaagtacaagacaggcgacaagccgggcgcgggacgctaccgctgcgacaactgcggctacgtcgttcgcatcacgagcgatgccgaagcccttcccgcatgccccaactgcggacaccacgagttcaccaaactggaagactgaccgaacgccagggccggcagcaagtccggcgcgctgccggctccgcaggggccgcgatgacgacgaaaacttctgcgtacggcaggaatcaaagggtttggtaaccggtgccgccgcctccgacatgccgagaacatccgacctgcacaaacgcacgcgcatcgccccctccccgcatcaaacgagagaatagagcggctccaagattaccaaaccgccccacttgcgccagcagacccgctttcgccgtcatttcccagatcgttcgcacgtttgcacttttcgggttataggcaagaaagtgtgtccgttttaggggtgtaagggcaggtcaaaccctcgataaaccatcgtttaaatttcggaggcaggtttaagtgcctggcaagaatgtgtgtccgctttcgacttgacaccgcaggtcagaggccgtaaaccgccctcttaaattccgtggttcaatcacgggatgaagaagatactgtgccctgcgtgcgggggcgacacgaaacgcaacgggaagacctcgtcgggggcgactcgttggcgctgcaaggcatgcggcgcatccaccacgcaacgttacgacaacgagcctaaactgctagagctgttcctgaggtggctgctctcgaaaaagacccaaggcgagttcggcatgcccggacgcaccttccggcatctcacgaataagttctgggacctgtggcccgtggctcctgtctgtgacgaggtccaccacgtggtggaggtggatggcctttggctggggcgcgacgtcgtgattatgatcgcctgcaccgagaagcacgtgatcggctggcatctagcgagaagcgagaacgcgcaggcgtgggcggcgctcatggcgcgcatagcccctcccgacgtcgtgattaccgatggcggaaaggggttcgagaaggcgagacgcgccgtgtggccgaacacacgcgtgcagcgctgcgtcttccatgcgttctgtcaggtgaagcgccagaccacgaccaggccgcggctccaggcgggcgttgagctctatggcatcgccaagaagctcatgcgcataggtagcctcaacgaagctgcggagtggcttgcgggcttctctaattggtgcacggcatgggaaggattcctaaaggaaaaagaggtggttgacgggcggatccgctacaagcacgagaggctgcgcactgcgcgcggcgggcttctgaagctttgtagggccggtaccctattcacctatctcgacgaaggcctgctcgagggaggacctgttccggcgactacgaacaggatcgaaggcggcgtgaacgcccagatccgccacatgctgcgagagcatcggggattgaggctgacgaggcgcgtcaaggcggcgttctggtggtgctatatggaccttgaagcccgtgcaagcccgaaagagatcctgaaggaaatgccgacggacgtcctgattgctgagttttatcgagcagctgccgaagctagcgaaaaagatgaagcggtggggcgctggggcactgctgtgcaatggaatgacctgcatgcaagcggcccttatcgcatggattacgattaggctctggacacactttcttgcctataaccccacttttccgggtcactttgacgagagaggcctcggggccggagcaacaaaaaagagccttcgcagatcgaaggctctttcgaattcatggtgggcgatacaagatttgaacttgtgacccctaccgtgtcaaggtagtgctctccccctgagctaatcgcccatgaatgcttgctgctttggaagttttccgcgtcagcaagcagatagtctaccagaagttcgccgaccatcaaagacaaatttcgaaaatatttttgcgaacttttctgaaatcgggggttgcgcgctacggacacttccagtattatatttcctcgccgatgcggacgtggctcagctggtagagcacgaccttgccaaggtcggggtcgcgggttcgaaccccgtcgtccgctccatcgtcgctaacaggccggtcattatcaaaagttttgaccggccttttcatgacggtgtcgacgaggtggcgacgtggccaagtggtaaggcagaggcctgcaaagccttcacccccggttcgaatccgggcgtcgcctccattcgctccccttgcggggcggacggtttgagaattgaaaagcgttacccatgcggacgtggctcagctggtagagcacgaccttgccaaggtcggggtcgcgggttcgaaccccgtcgtccgctccatgatcgtacaagcccgtcggcaaaccgacgggcttttttcatgcctcgctccgaacgatgaaggttagagcagctctaagaggtcggtgagcgccgtcacgcactcgtagccgcaatctttctcggcatcgtgcctgtcgacgatcaccgcgcggatgccggcagcggccgccccgtccccgtcggcatcggggcgatcgcccacatgcacgctcgattcggcgcgcacgcccatctgctcgcaagccaggttgaagatgaccgggttcggcttgcggtagcccaccaccgccgaagatactaccgtgtcgaagtacggcagcagcctgaggtcgcgcaggagcccttccaagcccgcatcccagttcgataccactcccagcgcgtatccacgctccttgagcgctctcaggcacgctgtgacgtcggcgtacgtctcccagcattccgcgcgccgataggcctcgtgcaccgtctgcgccacgccttccgcatcgtgaccgatgcccgcgagatggcacacgtagcggtactggtccagccaaatggccgtcgacccctcgtgcgagcaccagaagtcgccgtcgcgcagatactccgcttcgtagtacgcgtccatggccggcatgtgcggctcgacgtcgcgcacggtcaagtcgtggccgcgctcggccgcaacgcgcgcgaacgtctcggccaccgacgggcacggccggatgagcgtcgagcccacgtcgaagaacaccgcctcggtcatgcgccctcagtcctcatggccgtcgttcggctcgatgtggacgagcacctcgatcacgttcgggaaccgctgcatgatggcgcgctccacccgctcggacagctcgtgggcctcccccacggtcatcccgggcgccacgagcacgtgcaggtcggcgtacacctctccctcggtgccgcgcgtgcggatatgatgggcatcctgcacgcccggcacgcccatcgccacggcacgcacgtccttgtcgggaatgcgcgcatgatcggacagggtggctagcgcgtgcttgaatacgtcgtaggccgtggccaggatggcgacggtcaccacgagcgccatgatggggtcggccatgggaaagcccagcgccacggccgccagaccgacgatgaccccgatggacacgagcgcgtcggacagcgtatggttcgcatccgccgcaagcacctcgcttttgagccgcttcgcgcaccggcgctcgtaggtggtcaccccgatgttgacggcgagggtgcccaccatgacgatgaacgacacgggagttacttcggccgtgtacacgccggacacgagcttgcccaccgcgctcgaacccacctcgaaggccgccagaagcagcagcacgccgatcacgaggcttgcgtacgtctcgaacttcgcatggccgtaaggatggctgtcgtcggccggacgcgccgccaacgcgatgccgacgaggcccaccacgttgccagccgagtcgaacaccgagtggatgccgtcggcttgcatggacgccgatccgctcatcaggccgtagacgtacttcgcagcggccaccgccaggttcagcacgaggatgacccacagcacgcgccggatggagcgcatgcgctccgataccgggttcttcgttgcaagcgccttcgccacgcccgctcctttcgccgaaagcggctccgtccgcatatacaatgcggaggtataagaaaagagagccctaaggctctctccattctctctggtgtcggaggcgggatttgaacccgcacacccttaaacgggcactagcacctcaagctagcgtgtctgccgttccaccactccgacgtgttgctcgaaacgcaacgcaggttattctacccgaacccttctgcgttgtgaaggggcaattttcgctattttgcaatcgtcccgtggggatagatgatcataaggacgataagcgaaagcatgaagatgatcgcgaacgcgatggtgatgcggtcgaggttcttctcgacgatgctcgtaccggtttgggtggagtacaccgagctggcgatcatgtcggagatgcccgtgcccttgccggagtgcaacaggatgaacacgatgaggccgatgcccgaaacgacgagcaggatgagcgtgatgatgaggagcggattcaaggttcgtctctcttctttcgatcaaaggtatatcggtacgcaagtttctaagtatagcgaaaggctcccgtcagggcaagggcggcgcaggcgttcgcgtagcgggacgagacggagcgggacgccagccccgtccccctcgcctcatccccgcgaaaacgccacctacgccagcaggctcctccccgtcatggcggcaggggcttcgaggccgatgagctcgagcagcgtgggcgcgatgtcgcagagcgcgccgagccgaccgtcgagcgtgcgccccgtttccgcgaagtccacgagcgcgagcggcacaggcgccgtggtatgagccgtgaaggggctgccgtcctggctgagcatcttatcggcgttgccatggtcggccgtgatgagcgccgtgccgcccttgcgctcgagagcggccagcacctgggacacgcccgcatccaccgcctcgatggcggccacggcggccgggatgacgcccgtatgccccaccatgtcggggttcgcgaagttcacgatgtacacgtcggcctcgtccgcgtcgatggccgcggccagcgtggcagccacgtcaggctcgctcatctcaggtttcagatcgtaggtggcaaccttggggctggggatgagcgcgcgctcctcccctgctttcggctcctcgcgcccgccgttcaggaagaacgtcacgtgggcgtacttctcggtctcggcgatgtggtactgcgcaaggcccgcctcggccagcacgtcggccagcacgtcggcggggaactccttgggataggccaccggagcgggtatctcggggtcgtactcggtcaggcacacgaagctcacctgcgggtacgcgccgcgatcgaagcccgcgaacgcggggtccaccagcgcgcgcgtgatctcgcgggcgcggtcgggacggaagttgaagaacacgaccgcgtcgccgtcgcgcacgccgcgcccggtcagcgccgtgggcgcgacgaactcgtcggtgacgtccgcggcgtaggaagcggccatgacctcggcgggcgtcgcgtccgtgcacggctcggcggccacgacggcgcgccacgcctgctcgacgcgctcccaccggttgtcgcggtccatggcgtagtagcggcccgagatgctgccgatttcggcgacgcacgcgtcgtcggtcagctcggccagcacgccttccaactcgtccagatagcccgcgccgcttctcggcggcacgtctcggccgtccatgaagcagtgcaccacgatatgcgacgccccggccgccttcgcggcgcgcgcgagcgcgtagaggtgctcgttggaggaatggacgccgccgtcggagacgagccccataaggtgcagcgccgcccccggccgtgcggccgccgcgaacgcctcgttcagcacggggttcgccgccagcgaaccgtcggcgcaggcacggttgatgcgggtgagctcctggaacaccacgcgcccggcgccgatgttgaggtgtcccacctcggagttgcccatctgccccgcgggcaggcccacggcctcgcccgatgcctcgagcttggtccacggacgggtggcgaacacctcgtcgaggcacggcgtgcgcgcctgagagatggcgtttcccgggcccggctcggccaggccgaagccgtccatgatgataaggcatgcgggaagggtaaggttttcggctgatgccgcacgggattcttcgactgcgctcacttcgctcgctccgctcggtatgacgggaggcggcgcggagtgcgcgccgccgggacaacaggttctcagatccgccgtccgaagcgaagcttcgacgaagaacctccgttgacgagaaggcccttcgacccgcttcgctcgcccgggacggcgacagggctacaggcaggcgttgatcagctgcacgaaagacgccgccttcaggctggcgcctccgatgaggccgccgtcgatgttcggctgggccatgaggccctcgacgttgcccgggttcatggagccgccgtacagcacgcgcatctcctcggcgacctccgcgccgtacaggtcggcgagcgtcgcgcggatggcggcgcagacggcctcggcctgctcgggcgtggccgtgcgccccgtgccgatggcccagatgggctcgtaggccaccacgcagcgctgcgcgtcggcggcgtccacgccggcgaacgcggcgcgcacctgggcgcacacgaactcctcggtggtgccctcgtcgcgcacggccagcgactcgcccacgcacacgatggcgtacaggcccgcctcgacgagcgccttcaccttgcggttcacgtcctcgttcgtctcgccgaacagctcgcggcgctcggagtggccaacgatgctgcccgcgcagccgatctccttgatcatgggcaccgagatctctccggtgtaggcgccggagggctcccagtacacgttctgggcgttcacggccaccttcgtcttgtcgaagtcgagcacggtcttggccggcttgaggtcgacgtagggcgggcagatgacgatgtcgacgtcctcgccccaggtctccttgtcgtactggttggagatctcctgcgtcagcaccacggcctcggcgatggtgttgttcatcttccagttgcctgccatcatgggtttgcgcgccatgcgaacttcctttccatcgaaacgccccggacgggaaccgtccccgtccggggcaatcgcctgcttgctacttcaacgcctcgacgcccgggagcgcctcgccctgcacgagctccatggaggcgccgccgccggtggagatgaacgtcatctgctcggccaggtcgaacttgttcacggcggccacgctgtcgccgccgccgatgatggtgtccgcatccgcgttggcggccacggcctcggccacggccttcgtgccggcctcgaacgccttcatctcgaacacgcccatggggccgttccagaacacggtcttggcctgggccaccgcgtcggcgtacagcttcgccgtctcgggcccgatgtcgaggcccatcatatcaccgggaatcccgtcgaccgagaccgtgagcgtttcggcatcttcggcgaagcggtcggcgcacacgacgtccaccggcagcagcagctgcacgccgcgttcctccgccttcgcgatcatggccgccgcgcgctccacccagtcctcttccttgagcgaggtgcccacggccttgccctgggccaaaaggaacgtgaagcacatgccgccgccgatgatgagcgtgtcgcacttgtccatgagcgcgtcgatgaccttgatcttgtccgacaccttcgagccgccgaggatggcggtgaagggacggcgcggctcctccagcatgcccgagagcgtggccacctcgcgctgcatgaggtagcccgcgtacgccggcaagagcgcggcgacgcccgccgtggacgcatgggcgcggtgcgcggtgccgaacgcgtcgttcacgtacgcctcgccgagcgcggccagttcctcgcagaacgcgggatcgttcttcttctcgcgcttgtcgaagcgcaggttctccaccaccagcacgtcgccgtcgcgcagcgaggcggctttcgcgcgggcgtcgtcgcccaccgtgtcggtggcgaacaccacgggcttgcccataagctcggagagcttctgggcggcgggacgcagcgtgaacgactcctcgaagccctcgccggccggacggccgagatggctcatgaggatgacgcgcgcgccgtcgtcgacgagtttctggatggtgggcagcgccgcgcggatgcgcgtgtcgtcggtgacggcgccgtccttcaccggcacgttgaagtcgacgcgcacgagcacgcgcttgccgcgcgcgtccagctcgtcgatggttttgatctcggccatggggccctcctgtctaaacgagaaacgagcctgccaaggcaggctcgtttcggggaatgctgttaaagaaggatcttcaccaagtccttcacacggttcgagtagccccactcgttgtcgtaccaggagatgcacttgacgaagttgccctcgccgcccagcaccatggtcagcttgctgtcgaaaatggaggagtgcgggttatccacgatgtcgatggagacgatcggatcctcggtgtactccaggatgcccttgagcgggccctcggcggcggccttcatcgcggcgttgatctcatcggccgtggcgtccttctcaagctccacggtgaggtcgaccatcgatccgtccggcgtgggaacgcgggtggcgaagccgtccagcttgcccttgagctcgggcagcaccagcgacaccgcgcgggcggcgcccgtggtggtggggatcatcgacatggcggccgcgcgggcgcgacgcaggtccttatggggaaggtcgaggatcttctggtcgttcgtgtaggagtggatcgtgttcatgtagccgcgcttgatgccgaagttgtccatgagcaccttcgcgaagggggccaggcagttcgtcgtgcacgaggcgttcgagatgatgttgtgcttctcgggatcgtactggtcgtcgttcacgcccatgacgatggtgatgtcctcgttcttggccggcgcggagatgacgaccttcttggcgcccgcgtcaaggtgcgccttggccttcgtgccgtcggtgaagaagccggtggactcgacgacgacgtcgacgcccagctcgccccaggggaggttggcgggctcgcgctcggagagcaccttgaccgcatggccgtcggccacgaagccgtcctcggtgacctcgaccgtgtcgaaggcgcgcccgtggatggaatcgtacttgagcaggtgggccatcgtcggaatgtcgccgaggtcgttcactgccacaacctcgatctcgggatcgttcaccatcgcgcggaacgccaggcggccgatgcgaccgaatccgttaatgcctactttgattgccatgcgtatcccctttcagatactcgcactaagaattgcaggaacgccccgatcatagcggtagccgcccagatgctgcaagccttatctggcagccgtataaaaaaagcaaccgaacaggccattcacagaagtttcacaccgctcgccgaggggctccgcacccggtgcgcgccgtacagcagcgcgcttctcccagcatcggccagttcgcccgatccgtccgtgtcgcacagccgacggctgcggtaaggtgcccgtagacgcacgtccgaccgaaggagcagcatggaagcagtaccgcaggaaaccgtggagaagctgatgggcaacgtgccggcgcaaaaggagctcgagggcatccgcatcctcgcctcttcgccgggcagcgtgcgctacgagatcgacgtgccggacaacgtgctgaactaccacggctgcatccacggcggcttcgtgtccaccatgctggaaatcgccgccggcatggcgacgtacgcctacggcgagagcaacgtggccgtctcctgcgcgacgaacttcgtccgcgccgtacgcccgcagcgcctcaccgtgagcgccgacacctcgcacaagggccgcagcacgtcggtggcgcactgcgccatcgtcgacgagcgcggcaggctcgtggccgagtccacgttcacgatgttcttcctggggccgctcgagagctagcgcatcctgcgccgagcgtctccgtcctccggctgaagccccctagccttgcgcctccttcgccatctgctcgatgcggcggacgcggtggtacacggcggacttcgacaagggcgggttcgcgcgctcgcccagctccttgagcgtggcgtcaggataggtcacgcgcagcttgatgaagtcctgcagcgccggcggcaggttctccatgccgtgcgcctcgagcaccacgcggatggcgtacagctggtcgaccgaggcgttcgcggccttggcctggttcgcgatctcggcgttcgtcatgcggttcacgtcgttgcgcacgctcttgatgacgcgcgcgttctccatggcgagcgcgctctgatgcgcgccggcgaacgcgaggaactccaggatggcgctgccgcttttaaggtacaccatgtaggagctgcgtcgctgcatgacgcgcgcgcggatgcctttgcggtcgagcaggtcgaccaggcctccggccaggtcctcgctctccacggtgatctcgaagtggaagtcgccgcgcgggtcggacacgaagccgctgccgaggaacgcgccgcgcaggtaggccgccgtgcagcactgcttctccacgaggtcgggcttgaggccaagctccaagcctccatcgggcgagagaacccccatgtcgacgagagccggcgcgaggcggggctgcgaaggagcctcaatgaggtagttcggggtcttgtgcagcacgctgcggcgcaccgtgaggttcgtctcgagatggtacagctcgtgcagcagcttgatgatgaggcgcgccacggacggcacgtcggttgctatctcgatgcggtactttccctggccgctgaagaacagcgttccttcgatgcgcacgagcgcggccagcgtcgccttctcgcagtgcgagcacgtgggagggacgcgagccagctcgtcctttacctccgccgtgaacgacatagcttcaacacccccgcaaacgcatcgcgcaaggcagcaggatcgtgccaggttggatgaatgggatcgacgaggttgcgcgcaatgaccaccggcccctgcgcctggatggcctgcacgtcctggtagcatacgcgcacggggcggatgcgtccggacagcacgagatcgtcgaggtcggcagtggaggcgtgctccgagtcggcacccgtcacagcggtgaacacgcccgtggccgggctgtcggggcgcagcgagaccggggtatgcaccagcacgtaatccagcagcccgcgcgtgccgtggtccatgagcgcctccacgtgctcgcgcgcggtgagaccccaggtctccccctgcatgtcggcaagcgagcacacgaacagcgtggaacccttcgacgcgcggatcgcatccaccacgccgggcacgagcaggttcgggatgatggacgtgaacagcgagcccgggcccagaacgatgaggtcggcctcgcggatagcctcgagcgccggctggtagggcaccacctcgtgcgcggcgcgcaggctcacccgctcgagcgccgtgcgcgaatggcaggccacggcctgcccctcgagggagcggccgtcgcgcgtgcgagccgtgagcgtcacgcgatcgagcgtggagggatacacgtgcccccgcgcatccagcagccgctcgcagatggagatggcctcgggaaacgacccggccgcatcctcgagcgcagacagcatgaggttgcccagcgtgtggttgcgagcgaacgagaagcggtacttgaacgccttggtcaaagggtcgttcgggtccgcagccattgcggcgatgcacttgcgcacgtcgcccggcggcgtgacgtcggcttcctcgcgcaggatgccggtggagccgccgtcgtcggccatggcgacgacggcgctcgtatccagtcccatggacaaaagcgtgcgtatggacacgggcgcgccggtgccgccgccgatgacgacgacgcgcaagcgctcgtcgcgcgcgacgacgggctgcgattcgcgcagtgcggcgaacgccgccgtagccgaggggtcgtgggagaacggacgggcaaccatggtcgctcccctaccggcctgcagcagcgccggagcgcgccgaggcgtcggcgccctcggccagcgacaggtcgcggtgcgcgatgctcacgcggtagcccttcgccttgaggtagtccgccgtggactcggccagcgcgacgctgcggtgctggccgcccgtgcatcccacggcgatggccagctgctgtttgccctcggccacgtagccgggcatgacgcaatccagaagcgcgcgccacttctcctggaactcttcggtctcggggcggtacagcacgaagtcgctgaccggcttatcgaggcccgtgaggctgcgcagctgcggttcgtagtaggggttcggcaggaagcgcacgtccatgaccaggtcggcgtcaagcggcgctccgtgcttgaagccgaacgagtacacggtgacggacaggcccgcgcgctcctcgcccggcgcgaacagcgcgcggatggtcgagcgcagctgcggcggcagcatggacgtggtgtcgatgacgtgatgggcgttctcccgcacctcgaacagaaggtcgcgctcgcgctcgatgccctgcgcgatggatgcgccgtcggcgcacagcggatggcggcgtcggctggacttgtagcgcgcgacgagcttctcgtcggcggcgtccaagaacaggatgcggtagtcgatgcccaggcccttcaacttcttgagctcgccggcaaggctcgcgaagaagtcgcggttgcgcgcgtcgcacaccacggcgaggcggcgcttctcgtcgggctggccgggcatgccggtcagctccaaaagattgccgatcaggctggacggcaggttgtccacgcagaagtagccgagatcctcgaacgagtgcatggcctcggtgcgcccggcgccgctcatgccggtgacgatgaccagctcgggcatatgctgcagatcgacggactggtctgccgtcttgcctgcggtttcttcgctcatagcgctatccttccgtatccgtgcgcgtgcgttcgccctgcacggcagcctcgaccgccgcgtccaccgcggcggattcgaccgccgccgggccctcgcctgcgggcgggcagacggcctctccggcctcgccgcccaccacgcgctcgtctttccgctccctattatactgctgcagcacccggtacagctcctcggccacctcgacggggacgacgcgcgcctccttgatctcttcgagcgtggcgctcttcaggttcttgaacgacttgaacgccttcagcagcgccttcttgcgcaccggccccatgcccgtcacgtcgtcgaggatggaggccgtcatgcccttgccgcgcagctcgcggtggaacgtgatggcgaagcggtgcgcctcgtcgcggacctgcttcacgaggtacagcgacgccgagccgctgggcagcaccaccgggcccgtgtcctgccagggcacgaacagctcctcgtcgcgcttggccagaccgcacatagcgatgtcgtcgatgcccatccgctcgaacatctcgagcgccgccgacagctgcggcttgccgccgtcgagaatgatgaggtcgggcttgctgccgaagcgctcgtcggccatgcgctcgggcgcgtagcggcggctcatgacctcctgcatggacaggaagtcgttcgcctcgtcgagcggcgtcttgatcttgaagcggcggtactggttcttgtcgggcttgccgttcgtgaacaccaccatcgaggccaccgtgtaggagccgtggatggtggagatgtcgaagcactcgatgcgcatgggcggctcgtccagagccagtgcgctctccagctgcagaagcgcgttgttgatgcgcttgtcgtcgtagttcgtgcgcaccttgtagcgcatgagcgtgtgcttcgcgttcgtctcggccatgcccacgagctcggccttctcgcccttctgcggcgcggtgatgcgcaccttcgccccgtaggggctggccagcttttcggtgagccatgcctccatggcagccttgtcctcgggctcgtcgcgcaggatgacctcgtgcgggatggacgtggtggcatcgtagtagcgcagcaggaacatgtgcaggaggtcgtcgtcgggcacgtccttgccgcggtcgagcacgaactcgttggagttgatgatgcgcccttcgcgcaccatgaacacgtgcaccccggccaccgtctcctcgcggaacaggcccacgacgtcggcgtcgaggttgcgcgttgacaccgcatgctgcttgtcggtgaggctgttgatggtgtcgatgcgcgctttgatgcgcgcggcgcgctcgaagtccagctcggccgccgcctcctgcatctcggcctgcagctcgtcgacgaactcgcggtgctggcccgacaggaagcgctcgatgcgcttgacgtggacgcggtagtcctcgggcgtgatgccgccgcagcaggcgccggggcccaggcccacgtgcgcgtcgaagcacgggcgggcgtcgtgcgacatgagcgcgagcggatccttctccaaacggcgcttgagctggcgccagtcggcgcacgacgtggcgcacaggggcacgacgcgccgggcgatgtccaccatgtcgcgggcggcgcggctgtcggtgtaggggccgaagtacttggtgtccgcgcggtgcttctcgcgcgtgtacttgatggcggggaacacatcgcccttcgtgagcgcgatgaacgggtaggacttgtcgtccttgaagtcggcgttgaagaacggcgcgtgctggttgatgaggttcttctccagcacgagcgactcgtgctcgttctccaccacgatgtagtcgaagctgtcgatctggtcgaccagcaaagggatcttcgcgcgctcgtcctggaagttcacgtactggcgcatgcgggcgcgcagctgcttggccttgcccacgtagatgacctggcctgatttgtccttccaaaggtacactcccggcagcgtgggcacgctgttcagctcttccttgatgcgctcgagcttggcgcgctggccggtttcggcgcgcgcggcgtgggcgtcgtgctcgcgcgcggcacgttcgagcgatggccggcggcgaccttcccgttcgaggcgctcgtcgtcgcgaagctcccccgcatcgagcgaggcgtcgcccgtcaggcgctcgacgccgcccgcatcgggcatgccgagcgcggcgcccgacgcagccgacccgtcgccaggcgcgggagcgtcgtcggatgcggaagcgtcagcgggcgcaggagccccgtcgaatgcgagaagcccttcgtcgagcgggcgcttgctttgagtggtttcgttgagatcgtccatgcggccagtatagcaaaccgcacaagcgttcccctgagcgcacgttcgctccacgcggtttgcagaagagagacggatcgcggaaggcgtttcgccgagcgcaccgccgacgaatccggtcgggaacggcacggcattcccctatcggcaatccggatgcggcaacttgtgatacatacgaacgggtgcttcacgtgaaacgccctcggcagtgctactacttcacggcgacgtagcgggcgtagacggctacgcggtcgggagcgtcaatcgggaagatcggctgcgacacgtacacgtgcgctgcgggccatgcagaaggagcgcctttgtccaccgtgcgcggaaagccagggtcgggaccgtacgaagacgtggcgcacaggacgtaccagagcggctctcctgagccctcgtcgcacacggaaacgcagaacccgatgccctcccccgtgtccccatccaaacggtacgagtcgtcataatcgaccgcaaacgacgaaaagagcgacgtcggcagcatgacgtcgtagtacggcgtgtcgaccgtggtgtacagaggctcctgggacgaccccgccgcacacccggcgagcagcaccgagaccgtcgccagagcaaacccgatcatggcgatccgccgcatgcctccccctttcgatgctgacagtatagcatgcgaacgaatgctccgactccccatttaacgtataatccccgatcatgccgcgccccctccctccggccggaggcgacgggctgcggcggcgtccgaggtagttttgaccggatcgcacgggagcgaaggctgcggaagcgggaaacagggccgcccgtgcaagtttttcgacttcgtggcaaaggacgtcattcgcgaccaggggtttagcctcggcgcctctcgatgcccggtcgctccttcccgatgtagacgcaaaacgcccggtgaataagccggtcctcggaagctgcttgccacgaagtcgaaaaacttgcagaaccggcccgaaaaccagcgctggcggagcgctcgcagccgcgcggggcgcggacagcccgcggcaggcgccaccctgccccgcagtacctcgtccgcgcccccgcctgggctatgagcgaacgaatgtttcacgtgaaacatcttgcagaagagcgaatggctgcagcgaaacggatgctggcaccaggcgcacgatgcggaccgccgagcaggattcggggctcgggtgcagaagcaggccctcgaggaggcagcgcaggacgcgaaccgcgtatgtcgcgagcgcttgggcgccgagcgcgaaggagctcggagcggaagaggttcgtcaggcttgctcgagcttggctttgaacgagatggtgcgcggcgtgtccagatcgtcgaacgccacctcgtaggcgcgcttctgggaatcgaccgccagcacgcgcccggggccgaacgccgcatgcgtcacgcggtcgcccaccgcgaagcgcgcgtcgcggacgaggtcggcgatccaccggtcggcgagcgcgtaggctgcgcgcgcgtcgtcgagctcgcgctcggcgggcttgttcgagaactcgagcgccgccgggtcgatgtccagcaggaagcgcgagggatagcgcggcgcgccctcgtggccgcgcccttccgcctcggtgaggtacagcccgtcgcgcgcacgcgtcatggccacgaacgccagccgccgctcctcctccatgccttgcggcgtgtcggtcttgcgcgacgggagcacgccctcggtcatcgagcagaggaacacgtgcgcgaactcgaggcccttggccgcatggacggtcatgagccgcaccttgtcctgcgcgtcgtccatcgcgtcggcgttcgtgagcagggccgtgtgcgccaggtagtgctcgagcgtcacttcctccccgcacgtcgtctcgaactcgtatacggattgctttagctcggccaggttgtcgagccgctcctggctgccctcggtgcgcagcgcgcgctcgtagccgctttccgacagcacggccgccagaacctcggacaccggccggccctcgtacgacgagcggaagcggtcgaccagctgcagcagctggcgcgccttcgtgcgcttgaacagatcgtcgtccacgaagcgctcgagcgcctcgaacaggctgcatcccagctcgtcggccttctcgcgcagaaacgccatgcgccgggcacccaggttgcgcttgggcgcattcgccacgcgcgcgaagtcgaggtcgtcctggtaggcgacgaggcgcaggtacgacagcgcgtccttgatctcgcggcggccgaagaacggcacgccgctgtacaccgcatgcggtacctccgcgcgcaaaagcgcctcttccacgggccgcgacgcgtaatgggcgcggtagagcaccgccatgtcgcggtacgccacgccctcgccgtgcagcgcaagggcgccctgggcgatccacgcggcctcgccgtccgggctcttggcatggcgccacaccgtggggccgtgaaccgagcgcatggccgccagccgcttcggcacgcgctcgcggttcttctcgatcagcgagttcgcgacggccaccacgcgcggcgccgaccggtagttttccaacatcatgacggtgcgcgtgccggggaaccgcttgtcgaagtccagcaggtagcgcacgtcagccccgcgccaggtgtagatggtctggtcggggtcgcccaccacgaacaggttcttgtggtagccggccagcacctccatgagctcgtgctgcaggccgtcgatgtcctggaactcgtccaccatgatgtactcgagccgcttctgccatttgagccggatgtcggggttctgctcgaacaggtacagcacgaacacgatgagatcgttgtagtccagcccgaagcacttcttctcctggtagaggtagccgtagaagatgatgtcgcgcgcgtccgtcgcgtcgaggtacttctgcctcaggccttcgagcggcatggccagcatgtcgcggtagtatcccgggcgctctttcagtttcatgatctcgatcatgtcgcgcgccttcgagaacgtcatgtcccgcagggtgagcccgcgctcctcgtagataacctgcagcatggcatcgatgtcggcgttgtccagcacgagaaagctcttcgggtactgcagcgcatggccgtcctcctgcagcaccgacacgcagaagccgtggaacgtgttgatgtagccggtgtcgttgtcgcccgtaagacgccggatgcggcggcgcatctcgcctgccgccttgttcgtgaacgtggcgcacaggacgttgccgggcatgatgcccagctcgttcaccaggtaggcgaagcggtgcgcgagcgccagcgtcttgcccgtgccggccccggcgatcacgcgcacgtacccctcggtagccgtgacggcctcgcgctgcgccgcgttcaagcgcggcgcatcgtccccgagaaggccgtgtcggttttccgcttgcatgtcgatcatttgttccatagggttcagtataccagaaaacgcacagatgttcccgaacaaatgtttcgcgcgaagcattcggcgcacgaaaaaaccgccgctccctacatgaattgatggaacgcctcgatcagcacggggaccagcgcggagcagatgacgccgttcagcaccgagagcacgacggtctcgccgttcgtgcagcggatgagcatgggcagcgtggtgtcctcgcttgtggcgccggccggcgcgatgcacgtgggatagttgagatgcttggcgatccaggggatgctgaagaacgacacgagctcgcgcagcaggttcgccaggaacgtgatgctgcctacctgcgctccggcgatgtcggtcatcatgacgcccgccaggctgtaccatcccaggcccgacgccacggcggcgcccgtgggcagcgacatgcccgcgagcggcgcgcagacgagcccgccgagcacggatccggccactatgccggccgggatgatgagcacgcgcacatggtactggcgcagcttgcccaagaggccgcggctgccgcccacgctgatgcccacgaagaacatgagcgcgtagaggacggcttccgaatgatcggccacaaggtcgaccggcgcgagcgagacgcccgagaggccgtacgccgctcccagcgagagagctcccaccgccacgccgatcatgacggcctcgccgcgcgcatccgcgccgccctcggcatcgtcctgcgccgcagacacatgccggcccgccggacgccgggcgatgtcggacatgaacaggttcgtcagcgcgtacacggcgatcgtcgagaacgccaccggcacgaggcagaacaggatgctggcccatcccacctggcccagctcctccagaaacgaatcgcgtccggcgagcagcacccccatcgagaagatgagcagtccggtggccgcgagcgtcagcttctcgttcagccctttgagccgtgcaggaaacaccgtcgcccctacgagcacgcccgccgccatgaccgccagtatctccacgactcccctttccatcgatcagcgtgcgggcgcgtcgcgcgcccgcacgtcgtaggggagctatcttaccgcatgatcgaaggcggcggctcgtcgtttcgaagcgttacggccgccgccagcctcaccgcgcctgcgacgacgagcagccccgcgctcgccagaagcaccgtcgacacgtcgggggagaacgtcagcaggtcgcgccacggaacgccccagacgaaaggaagcgccaggatgcaagcggggagcgcgacgtgcagcaagacgcctcgcacgagcagcatgcgcagcgaccgggcgcgtacgatcggcgcgacgcctcccctgcacgctgcggaaagccggcgccgccaccgacccgtcagcagcaacggcgagacggcgagaagcagggcgctcgcgtacagcacgtcgacgcgttggcgccacgcccatgtccacgcatcgtccatcggctgccccgtcccgccgatggcgaccgacaccaccccgccgaccaggtcgaagaaccggatgttgccgcccgcgttgtcgttggcgtcgctcagcgccacgatgccgatgccgcgctcgggcagcaggcacatgctggcagtgtagttctccacctgcccgtcgtgggacagcacaagctcgccgtcgtcccacgagaacgacgtccagcccatgccgtaatacgtatcgccctcggggtcgggaacgcggtcgaggaacatgcgccgcacgctgtcggcggacagcacgcgcgcgccgtcgccgcccatgccgccgtttagatacatccgcaggtaggaggccatatcccgcacgctggaagccacgtagcccgacgcgggaccgccccatgcgccgtcgccttgggcatgccggaacccatcggccacaggcagcccgaaccagtcgcgatggcccggcaccatgccgagcgcctccgctcgcgccggatcggccgtcgtcgaagccatgccgagcggctccagcacgtgctcatccaggtaacgagcgtagtcctcgcccgaggctccttccaccacgcgccccagcaggtcgtagttcgcgttcgcgtacgagaacgccccgaacgtctctcccagctcgccgtcggcggcttccgcgagcgaatcgtaggcgccgaacccgctcgtttggttgagcaggctgcgcacggtcacctcgtcgggcacgtcgtagcccggggcgtagcgcgacgcgggcgcgtccagatccaccgcgccctgctcaaccagctgcatgacggccaccgccgtgaacgatttgctgagagagcccacgacgaaaggcgcgtccgcgtcggggcagtcgccgaacgtgcgcaggtagcgcacgccgccggcatccaccaccgctaccgccagcccgggcgcacccgctcgcgggaagttcgcggccaagtaggcgtccatgcgcgcggccagctcatcgcccgtaggctcgagcccttcgggagacgccccttcgtcggcctcgtcgagatcggcggcggacgcctccgcgtcgccgggatcctccgggtcgtccgaagccttcgcctcggtcgcacctccggactcggcctcgctcgccgcgccgtcctccgacacggccgcctcgccgcctgcaagcggcaggacggtcgcctcccccgacgcgcaggacggcagcagaagcgcgcatgcggccaaagccgccgccaccgcggccgcgacgataccgcacgtcggtctttcgctccggcgtcccatgctagaagctgctgtacacgaactgcaccggctcgctcagccccgagaagaccacgaaccaccccagcgccagcgccagcgcaaccaccgccagcgcggccgccgcgccgagcagcgccgggcgcgcctccgccgcagcgcgcgccgcggcagccagccttctcgcgcgcgccatcacgatgcgctcccgcccgagccgccgtccccggcgtttccgcccacgccggccagcgaagcgcccgcgtttcccgccgcgtccagtccctcggccgcaccgaaccggccgccgccgagaaacgcgtcgtcgcgatcgtggacgaagtcgtagaacgcctgctctatgcgcacccaaccgcgccagccgggatgcaccgtgtcgcacaggaagtacttctcgtattcgcagctagagaagtcggcgtaggcggccccggcgtcgtcgcacagcccgcggatgcgctcgtagtacgcctggcgctcggcgtgtgcaacgccctcgcggtcgtaccaggcaccatgcaccggaaggatggtcacgagcggctcgagccctgcctcgcggcacacgcgcaggaagcaggcgagatcggcgtactcttcgtcagcctgcgagaagttctgcccgcgctccacgtgatagcccgagttcttctgccagtacgcgtcgtatatgccgaagtcgttcgtggtgcaggcggcgtcgcccgatgcatccgcctgcttcagcagcgcgttccaatccggctcgccggtggacgtgcccgcggcgcggacggtgcttttgagcggcgcgcccgcgatgatgcccggaagccggctgcgcgtgcgcaggtcgtcggcgaacgccgtggccgcgtcgttcgctgcgtccagcacggtgtcgcggttggcggccgccgtggtcttcgcgtccacgcccagcgcctccacgcgcgagcgcacgtaggccttcgtctcaccggagatgctcgggttgttcgcgaaccggcggtacagctcgtaggagaacttcgaagcgaacttgccctggtcgccgttccctttgaagaaccactggggcgacacgacgatcatcaccttcttgttcttcgcttcgccggcgtacgcgcctgcggcgattgcctgccacaggctctggtcgtacgcctcgcccacgtaggtcagatcgacgcccgtcacgttctcgccgaacaccgcctgcgggcattgcgccaccttgtccttcgagatgaagaactccgacgagccgaacgcaagatggccgtcgtcgctcatcgacgccgtggtgaagggcacgctctgcgacttcgtgcccgagtacacgtaatcgtagaggcgtgccggatcgtaggcggtctgtgcaggcagcatcgcgcagacgcccgccaacccgagcgcggcggccaacagccccgcgagcacgccgcgcagcagacgcacgccggttcgcgcccgtttggacgcgggcgctgcccccggtatgttcgagcgcttcgccatatcgctacagtctgatctccacctggtggatgatgaggttcaccgtgttcatctcgtcgcgctccacctccgtgggggcaatgtacactccgaagacgtcctcgatatccaccaaaagctcgatggctcccatggagtccagcagccccagcgcgaacaggtcctcgtcgcggttcgtgcgcacctcgtcgtcgccgcacacctcttcgaggatgtccagcatcttctcctcaagctcctcgtacgtcatatcagccattgaacgctcctttcacgagcatcgcgatctgccccgagaacagcgcgaacccgaacatcaccaactgcagcgtgacgaaccaggacagcgccttgaacgcgggggccttcctatgggacttgtagaacttcgacttcttctgaaacgcttcgttgccggctagcagcaggccgtgaaacaggccgtacagcaagtagttgaccgtgaggccatgccaagcgcccataagggccatgtcgaacacgaagccccagcatgcgacggccagccggctgtcgaaccaacggcgcctcagcgccaagcgcgagaaccgcatgaacacgaagtcgcgcagccagaacgacagcgtgatgttccaccggttccagaagtccttgatatccacggccgcgaacggcgcgcggaagttgcgcggcgtccggattccgaaacagtagctggcgcccatggccatgaggctgtagcccgcgaagtcgaagaacaggtacagcccgtacacgtacgccgttcgcacctgcacgcccagctcggcgaggaaaggccccgttccccaagctgtcggcgcatagaagcggtgcagccagacggctatgacgaaggtgtacacgagcccgaccagaagcagcaggatgccccgcgccaagaggcccgcgtactcgtcgcacgagcgcaccttgcgcgcatcctcggcgaatcggcgcgaacggtcgatggggcccgaggtgaacaccggaaagaacagcaggaagtacaggtagtcgaacaggcccagctcctcgatgacgccgtcgcgcacctcgaacagcacctgcagcgccttgaacgtgatgtaggacacgcccatgaagcccagcaggttctggtcgaacaccgcgcccgccttcgccgagaggagcggcaacaggatgagcgcgaacgcgacggcgaagcgcccgttcgagcgagggctggccaacacccaacgcgtcgaaagcgtcgccgtcgccacgaacaacgccgccacggcgagacccggcagatccttgcagaacaaacacgccaagaacgcggccgatgcgaccataccgtagcgcgcgatcggcttctcgcgcaatccgaggaaggcggcgcccgccacggccagcgccaagagcatgaagaagctggggtcggcgtagaacgtcatcgatgatcgccatgcctcatgcctcggccagcgccttgcggtccaccttgccgttgcaggtcagcggcagctcgcccacgagcgccaccgatcgcggcaccatgtagccgggcacgcgctcggccagccgagccttgatgagacgagctatctcgaagtcgctgcctgcaggacgctcgcgcagcaccacgcacgccttcaggtacgccacgcgctcgcggcgacgcacgggcacgaccgccgcctgcttcacgagcggcagcgcgccaaggttctcctccacgtccgcaagctcgatacggaagccgttcaccttcacgagcgagtcgaaacgaccgtcgcagtacagcatgccgctttcgtcgaggtggcccgcgtcgcccgtgcggtaggcacgcacgggcgtgccgtcgacaagcgtcgcgtcgaagaaggccgccgccgtcttctcggggttgcggaagtagcctttggccaccgtgtcgcccacgatgacgatctcgccgatccgcccggcctcgcacggggcgcccgtctcggggtcgacgatgcgcagctcggtgccggggcgcggacggccgacggggagcgggcgctcgtcaaccagctccgaatcgccgatctcgacgtaggtgaccgccacggtcgactcggtgggaccgtacgtgttcgcgatgcgggcacgagggaaccgctcgcgcagagccgcagccgtggagcggcgcagggcctcgccgcagaacaggaacaggcgcacgtcgggcagcagggcttcgtcgaagctgcggtcggccaggcacaggtcggcgaacgacggcgtggacgtccacacttccacgcccgaatcgcgtaggtcggcgaatagcgcgcgcagatcttcggtctcctcgcgttcgacggcgtgcaggcagccgccggtggcgagcgcgcccaccacctcgtactcggacaggtcgaacgagtacggcggttggtccaggaatacgcgcccgccctcgcggatcacgggaaacgtgcaaacccagtccatgaagcgcgcaacgttgtccgcgccgacctcgatgcccttcgggcgacccgtggagccggacgtgaagatgaggtactgcgtctcgtcgcccgtcacccagctcgcgcgatcggggacgacgaaggggctgcccgctgcggcgacggccgcgcgcgcatcgagcacgtctgactcgggcagcgcgcacgccagggcatcgggcatgtcctcggtaaccaccacgagcgtctccccgagctgggacaggatgtccgcgagacgcgtaaggggcatctccgtgtctacggggacgaacgcatgcccgcttttaaggcagccgagaaaccctgcgatcatacatgcggatttgtggccgagcaccaccgccggctgtcgcttctccgtgcgggccgccaaggcggcggcaatgcgatcggaggcctcccatagctcggcgtacgtggtcgtcaggccgttcggcgccttgtgggcaggcgcttgcggatgttcgcgcacctgctgctcgactgcgcgtaaaaactcgttctcgctcctcatgctgatcctcccgcagcttccactatcaaacggaaagaatctaagacgcatttctcaataaaatgtctacggggcccgccgatcaccgtctgcgcacatttcggacaccgttccgacgcattgacgcgcacgatcgcgcctcgttcaggctgccgtaccgtatactggaatcttccgaaagaaagcgagcccatgagaccgacgatctacatcgacgccgacgcctgcccggtcacgtccgaaaccctggccgttgcgcgcaagaacgcgttgcccgcggtcgttgcgggcaacgcgacgcagaaccttgctcggcacatcaggcgcggagatccgcgcgagccccgcgacgggttctgggtggacacgctgcccgtgggcatcggcgccgacgcggccgacttcgccatcgtgcaggagctggaacccggagacatcgtggtgacgcaggacatcgggctggccgccatggcgctgggacggcacgcccgggccatcggcgtgcgcgggcgcgtgtacacgctgaccaccatcgacctcgacatgcacatccgccacgaggagaagaaagtgcgccgccagggcggccggacgaagggtcccgccgccttcgaagacgacgatcgcgagcgcttcgccgcgaacctccagcgcctcgtagaggagacgctgcgcgacgggaaacgggagggcttccctacaagctgatcgcttgcgacggatcgacgttgcgcaaaaacgaggggtcgtcgaacaacgccttgcacgcaagatcgcgcgagcgcaactcgtgttcggcttcgttcagcaggttgtcgaggaaccgcacgacgaagcgaaggtcgggcaggacgcccgctttcgcgttgcggtagttcgcgcgcacgagcgcatcgcgaaagtaccgagcatgccgctcgaacggctcgttgtccatatcgaagcccagatcgtgcaggtagagcaccgcgaacaccgccgtcgtccgcgtattgccctcgacgaaaggatgaacctgccacaaccttgcgataaagcggccgagatgttcgagctgagcttcgtcgaactcgatgccgtagacgtgcgaccgctcctcgtcgaatagaaatgccagcgagcgctcgatcaacgagggatcggcgtacaccacgctgtcgccgttcagcacgaactcgcgcttttgcagcgcttcagtcttatactcgccgggtcgatacgtcgccgcatcgagatcctggaacaacgcgccatggatcacggcgagcatatcgggtaccagcgcgaacgcgcccgaagccagcagctcgacgatgcgctggctcacgaggtcggcttcgcgctcccccgcagcctcgtcgcgcccatccgccttctgtcgcgcgtggtaggcgcgaatcatgctgcccgtctcgtccagcccgcgcacgccgctcacgtgctctcgagcgagatcgcgcagatacggagaaggcttcagcccgtcgacctcctgcaagcccatcgcaacgcgccaatagccctcgcgcacagcggggtcgcgaagctcgggcttcgcctcgtacggaaagtcttctggacaatcggcggtcaacgaagcctccttcgcaactgttcggaactggatcacgttcgccattgtagcgcattacgaggcgggcatgttctcccagtagtcggatgacgtgtcgtcgttgcccacgatcaccttcgcgcgcagcacgccctcggccggcaggtccgagaagccgacgatcacgccgtccatccaccactgcaggcccttcatgccgtacaggcggcgctcgacgaatgcggtggacacgcgcagctccgtgccgttctcgatgaagccgcccccgtcgtccacgcgaaacgggaacccgttctcctcgacggccgacgtcaccgtgcccgacaccgtatagccgcagtcgtacgacgcgaggatgtcgtcgagcgtttcttcctcgacgcgcccctgctgctcgggcaccagatcgcgcgccggaccgaacaccttctgcgcaacgatggcgccgtcggtatgagcctcagtggagcggatctgcacgctatcgcccaccgccagctcgtcgaacggtacgtcgaagtgctcggtagacgcgcaatcgaccgacacctgcgttcccgtcgcgatatcctcggtggattgcgttatcgccagcacgagcacgagcgcctcgtggtcgatggagacgatgttgcccgtattgtggtacgagtagctcgatcgtacgggaggaagaggctgcccctcgtccgatgtcgacgagaggcgtgcgttcgacagcatcctcatgaacaaggggccttcggacgtcgcgtattccacgcgcggcgtatcgaaccattcaggcgtgaccacttcgatggcgccgccgccgaggtcggtttcttcgggagattccagccgaaacgtggataacagcatgaccggcagcagcacgatcgcgcaaagcgcggcataccccgccaagcgataatccttgccggatcctctcagcgttcccaccaagacgaacgggatcgcgacgaaacacgtgaccagcacgcaagcggtcgggatgtcgtaaacgatgttgcgcagctccaaaccctgagccgccgcctgcttctggcaaacgaagaagaatgcgagcgcgcacacgctgacgcccaccgatccgacgagcaacgcgatgcacgccgcacgcaggttcgcgcgcggcgcgggacgccggggctcggaaacgggcggcgcatgtctcggccggggcgcagactgctcctctaccgcacggtagcgcccgaccagtgcgcacgccagccgctggaacaccgccgccgtggcaagcgcggacgcgacgaagacgaggccttgcaccatgaagccgatcagcgaatgagccgaatcaaggacgccgcttgcagcgagcgcccatgccgccaggacgaacgcaagctcgccgaggacccgtttgaacgagcgccgcgcccaccgctcgttgctgccgagcgcccaggatatcggcaaaacgagggcaagcccgctgtacagcatgaagatcgcatgatcccatacccatgaaagaggattgggatagaggccgaacaagctcggcgactgcaggcagctgccgaccatctgcacaacaagcacggtgacgaacaccgtgagcgcctcggcagctaccgcgccggccgaaccgcgcgaaggcttgaacgacgcccatagcatgagcgtcgcccccatgaccgatgcgttgacgtacacgggaaacagcgtgtcgtccgcgggccacggcaccagcgacatcatcgccgaaaccagcacggcgacgagcgcgcccaccagcgcgtacccgagccgcgcgagcacctcccccgtccccgcgcccgtgcgctccttcgtcgtgaaatcgtcccgcatagcgcccaccccgtctacaatccgtgcgactcccgccgtttctgggcttcgcggtataccgcatcatcggagcgaaccccaatcacgacgatgcgcatggcatgctcgatgcgctcaagcttgtacacgatccggatgccatccgacttcaatttcactttcatcaggccgctcaactgggacaagcgcttgttcccaagaggttttccgtatcccccttcggatgagggaagaggattcgactgcactttggcgatcgccttcaccacgcgtatacgctgggatccgtccaatgcgcgaagatcctcccgagcttcgggaaggaacgacagctcccacatcacgccagctccacgtcttcgatggcgtcaacatcctcaagcgcgatgcccagctcggcgtacacctcttccgcagggacggatcctgcatcctgattcgccgtcaaccgcgccatcgcttcggccataagcaccatgtcggcctcgacctccgagagataggcgtactcgtccggcgtcgtgataacgcgatacggtgcattgttcttcaacacgatgacgggcgtggaattagacgccgacgagaaagcctgcgcggccttgccccggctgaacgccgaaacaggcaccatgttgtctagcagctcagcgggtgtcgccatgaaaacctccttatatcgtgaaaatatactagcatattttcacgatatagacgaatcacggctgcgtgtcatccttctcctcggccagcgcctcgaaggccgctttcatggtggggttgttcctggtcaggcgcttgatggtgaggtcttgggccttgttgttcgccaggcgcaggttgttctcggacgacacgagggcgtccttggtcttctgcaagtgcaggatggtcttgtcgatctcgtcgatggccgtctggaacttgcggctggccagatcgtaattgcgcgcgaaaccgcttttgaacgtttccatctgctcttcgaatttcgtgatgtctatgttctggttgcgcaccaccgccagctccgccttgtacgccatcgagttcaacgccgcgttgcgcaggatggagatcatcggcaggaagaactgcgggcgaatggcgtacatcttctcgaagcggtacgacacgtccacgatgccctggttgtacagctcgctttccggctccagcaacgtgaccagcaccgcgtactcgcaccccttcttcctgcggtcggcgtccagcttcttgaaaaagtcctcgttcttgtgacgatgcgacgaatcgtcggactcgttcttcatctcgaacatgatggacacgatctcgttgccctcctcgtcgcattcgcggaagatgaagtcgcccttcgagccctcggacgcgtcgttgtccttctcgaagtacgcgcgcgggaacgcggcggcgcggatcttgttgaactcggtctcgcagtgctgctccaacgactcgcccaccatcttggtggacaggcgcgccttcatgtccttgtagcgctcgatctcgccgtccttgtaggcgatgatgtcgtccttggctttgagctcgatggccagctgctctttgagggcgctctcgcatcggctcttctcggcgtccttgagcgccacctgcgcggccagcgcgtcgcgctcgcgctccagcgccgaacgcgcctgctccaccgccagcttcttctccgcctcgaaggcgcgaccctgcgcctccacacgttgctccaactcgacgatgcgggcgtccttcgcagccgccgcgtcggccagcgcccgctcgcgctcggcgtgggccaggcgctgctggctctcgcgctcacgctgctccgcctgcagccgcgcctccagctcggcgatgcgcgcctccttctgagccgcgtcgccctgcgctttcgcaagagcctcggccacggccaactgcacggcttgctgcttctcggaggccatcagctgctcgtggcgacgcacctccttgtcgaactcggcgtcgcgcacctgcttcagaatggccgcgaaaccggcctcgtcgatggtgaacatctcgccgcaatgggggcacttgatctcgttcatgctcgctccttctcccgtatcccccgattctaccccatcgccgcgcaccgccagccctcctttcgggacagccgaagcgatacccggttatttccacggccggctcctcgataccaacacgaagggcaggctagatgagccgaaaaaccgggcgctgcggtaaaaacgagacggtttggtaatggcgctcaatacggtcattaggtaggacgatacgctgaacaggggtttcgcggaaaatctcgtcgtcacgataagagaagggcctcgaaagcgctcgattcaggcttcttgaattccaaaccgttccgattttaccgctgcgaccgggttttcgcctcatcgatccgtgcgagccggtagcgtcccgaaagttggtgtatcaatccgtttctggagggcgggcgaagcctgcccgagaaaaacggacatcgtctagaatcgtcaatcaccacaaaagacagattcgaaggaaggcgatgcccgctatggacactctactattcaacgaccccgaagtgaaggggctcgcgttcgcgatcctcgaggaatgcaccgacctgcaggccttcgggcgcaggatgctcgagctcctggcgaacgccgcgatgtcggcgaaggccgacgaggcgtgcaacgccccctacggggagcgcgacgaggggcgcgtcaactcgcgcaacggctaccgggagcgggggctctcgaccgccgcgggcgacgtcaccctcaagattccgaagctgcgccgaggctcgttcttccccgaggacctgatcgagcgctactgcagggtggaccgggcgctcgtcgcggcggtggccgagatgtacgtcatggggatatcgacgcgcaaggtggaggccgtcgcgggcgagctcggcgtgaggtcgatgtcgaagtcgcaggtgtcgcgcctgtgcgagtgcctggacgccgaggtggacgcgttcaggaggcagcgcttcgacggggtgcgcttcgcctacctgtggctcgacgccacctacgtgaagtgccgcgtggaggggcgctcggcgtcccaggccgtcgtgaccgcgatcgggctcgacgacacgggccacaagcgcttcgtcggcgtggactgcgtggacacggagagccacgccgggtggaaggcgttcctctccggcctgagggcgcgcggcgtcgacggcgtgcgcctcgtcgtctcggacgcccacgaagggctcgcgaaggcgatagccgagacgttccaaggagcggcctggcagcgctgcgtcacgcacctcatgcgcaacgtggcgggccgcatccacaggaaggacgaccagagaaaggcgcgcgaggccatgaaggccgtcttcgcgcagaagagccccgtcctcgtgcgggcgtgctaccaagaggcgaccgaggaggtgctgaagatctcgagggcggccggaaacgtgctcttggaggccgaggaggcggcgctcgcctacctggcgttcccggccacgcaccgcaccaagatccgcaccaacaacgtccaggagagggccaaccgcgagatcaagcgcaggacgcgcgtcgtgcaggggttcccctcgcgcgagtcgctcatccgcctggtgggagcggcgctcatcgaggccgacgaggagtggtcggcgcgctgcgtcatctccaggccctcgctcgcgcacgcctggaaggcccaggagcgcgaggcccccggcgaggccgaggtgctcgccgcccgcgaggcggcgcgcaagatcatagggagcgccattgacccgaaggaggacgaaggctaagattcacctcgcaagggtgccggcgattctccggcgatggccctgatacaccacgattcgggacgcggcctgcgagcctgtttgccgcgcacgccgacaggtgccgtcggatcgcggcggcttcgtcgcgccgattctcgcacctggcaccgtagcgccccaccgcgaaacgcgagcacgaggaagcacggcgcgcaggcggccccgcgcgccgaacgggctcattccgatgtcggctcaacagcgaggccgcttcgtcgcccccgccctgcccccgttctttcccgcacccctttcccttcgacatgctgttttgtttcgaatcgtttaaataagcgcaaccatcgcaattcggtctttataatgagcctagtatgaatacacgtgaatggaggtccgccaagatgagttacgtcgataacgtcatcgagcaggtcaaggaaaagaacccgaacgagccggagttcatccaggccgtcaccgaggtgctcacatccctgaagccggtcatcgagtccaaccccgcctacgagaaggccggactgctcgagcgcatcgtcgagccggagcgcgtggtcatgttccgcgtgccctgggtggacgacgcgggcaacgtgcacgtcaaccgcggctaccgcgtgcagttcaacagctgcctcgggccctacaagggcggcctgcgcctgcatccgtcggtgaacctcggcatcatcaagttcctgggcttcgagcagatcttcaagaacagcctgaccacgctgcccatgggcggcggcaagggcggctgcgacttcgaccccaagggcaagtccgacatggagatcatgcgcttctgccagagcttcatgaccgagctgttccgccacatcggcgccgacaccgacgtgccggccggcgacatcggcacgggcgcgcgcgaggtgggcttcatgttcggccagtacaagcgcatcaagaacgtgtgggaaggcgtgctcacgggcaagggcctgtcctacggcggctcgctggcccgcaccgaggccaccggctacggcctgatctacttcgtgcaggagtacctcaactgccacgacgacagcttcgaaggcaagaccgtcgccgtttccggctcgggcaacgtggccatctacgccacgcagaaggcccagcagctgggcgcgaaggtggtcaccatgtcggactccaccggctggatccacgacccggcgggcatcgacctcgacctcgtgaagcagatcaaggaagtggagcgcggccgcatctccgagtacgccgcgcgcaaggagggcgtcgagtaccacgagggccgcggcgtgtggagcgtgcccgtggacatcgccctgccctgcgccacgcagaacgagcttttgctggaggacgcgaagcagctcgtggccaacggctgcaagatcgtggccgagggcgcgaacatgcccacgacgatggacgccaccgactacctcatggaaaacggcgtggtgttctgccccggcaaggcggcgaacgcaggcggcgtggccacctccggcctggagatgtcccagaactccgagcgcctgtcctggacgttcgaggaagtggacagcaagctgcagggcatcatgaagaacatctaccatgcagccgacgacgctgccaaggagtacggccacgagggcaactacgtcatgggcgccaacatcgcgggcttcaagaagctcgccgacgccatgatggcccagggcatcgtgtagtcgcggcagcccggaaagcatcgcgcgcggaaacgggtctcgtcctcaggacggggcccgttctttttgccatgcaatgcgcaggacgaactcggccgtcgcccgcttaccgaccgggccgatcacgctccagcagcgacaccgtacgttcgacgagcgcgacgggatcgtcgccgtcctccgggaagcgcacggcggccgagcgaaccgcgcagaacgtcttcctgccgtcgatgcgcaccttccacagcaacgccagctcgagagcgcgcatgagatcgacgagcgaaccacgatcgacgtaatcgcggatgacgatcgcgaagcagcccgcgctcacgcgcgcagccacgtgttgaacctggatcacctcgtcgatctcgcctttcacgctttccagatacgaacggcgagcctccggtcccaacgacagcgccgcatgctcgaaaccgtccaccataagacagacgatcgtcaacggaacggcctcatcacggcaggcggagcgttcgagctcgtcgacgaacgcgcgataggcgagcaaccccgtctcgtcgtcgcgacgcacggcttcggcatgaaaccgacgcgcacgtcgaagggcgagcaaggcgaaggccagtccgaagatcagcgcctcgaccacgatcacgcccacggccaggaagatggaccattcccggggaatccaaccctgctcgggcataatggacagcgtccattgcgtgggcatgttgaacgtcgacttcgccgcatgggagaaatcgtgcgagccacccgaagcggcgatcacgtccttgctgccatcctgagggctgaccgaccatagctcgtacagataccccgcttcctcaagggaggcgaagtcgagctgttcaagcacgtaagactccttgacgcccaccaccgcctcgccgtagtacgaaccacccacgttcaccggtctgacgaacaggaagacgttctcgccgctcgacagctcgaccgaactctccaccacgaagccgtcggtccacttggccagcgtgtacacgtacgagaacgaggtgagatcgtcgccgacggtatccccgaactcctcctcgggataggcgtaggccatcgtgtcgccgcgcacgtaggcgacgtaggacacttcctcgcgctcgagcagctcgcccgccacgcgagggaaccaggcctcgtcgtccggatcgacctcgaaggcggccgcgaggtcgtcgaccgggctcacttcgtcgtagagtttcgtaaccatggcctgctggaaatagttcagcagattcagggcgtcgcgctggcgcatagcgcccatctctctatagacgaaggcgcccaaggagcctaccagcgcaacgacgatcaacgcgaacccggcgaagccgatcacggtcgccacattgcggcgtctcactgcgcatcctcttcgccgaacacgaaatacccttccttgccatgctgcttgacgcgatacagagcgttgtcggcctgccccaaaagcgcatcggcgtcggaaacccggtcccacacggccgcgccgatgctgcaatgcaccgagaccaccgcgtcgcccacctggatgtccacatgaaggtcgcccaccatctcgtcgagcacggcgcgcagctcgccttcgtcgtcgatgtcggtcatgagcatcacgaactcgtcgccgccgtaacgtcccaccatgccgtcgtagcgccgctcgtagccgcgcagggcgtagccgatggatttcaaagccgcgtcgccggtcgcatggccatacgtgtcgttgatcgtcttgaagtcgtcgaggtcgatgaagcagagggcgtacagggatccgccgtcccgcgcgttctcgagcgcactcgccagcttgctggagaacaccgagcgcgtgacggtgccggtcagcccgtcggacaggcccgacgaggtgagctcgaggatgtcggcgatgtcggcttcagccgatcgcccatcgtcgtacactttcctctgcagctcctcgacggacttctcaagcatgcgggcgttttccatttgacacatgaaatcgcggcgaagcaacaggaacacgcccgcgacgatcgccaaaccggcggcgatcagcggagcgagcgcggccatgaccttggtgtacgcgtcccagaagctcgtcacgcatacggcgtcccatgcggtatcggcgataggaacggccgtgtagtatcgtacatccaatccgtctacggtccagaaggacaccgggttgagcgccatcagctcccgctccacgacatcggcggtcataccgaacgcgatgctgctgcgaagcgggtcgaggaacatgtcgtcgtacacgaaacccgacgtggccgacatcgtctggccccggcttccgatgagcaccgatcccacatcggggccgacggcgctctcggcgaggatgcgcaccatatcgtcgaagtacagcgagacgaacagcgatcccgtcatctcgccgccgtcgaagaggggcacgagcacgacgtagttgagcgtcacgccgtcggcgccggccgcgaagctgtcggtgaccaagccctgacccgtggaatagcatttctgcatgaaatcgcggctggcgaggctcgccgaacctgtcacgtcccacacgttcatctcgtcatcgacgtagcatagcaggaagtagccgaaatgctcgttcacctggtcgagcatcgtcactttgtccatgacccagacggagcgttcgtacagcgtcggctgctcggccaacgattccagcagcttgaaagactccgcgacgctcgactcgatgcgcgccttggcgttcgtcagcgatacgtcggcccgatcgcgcatatcccgcacggccagaaccgcgcccatcacagcggatgcgataagcagcgccaacgcgagcgcgactccgtacaaggccatgcgccggaacgagaaccgcgttgttctcaggtttttgcctgttgttttcgccattacgtcgtctttctcatgcgcgccgatggtggcatcataacatacgccctcttcttcgaagcatgggcgaagactggaatgcccgctccgccgggattattcgaaagcgcatcgtccaagcgagaccgtctgcattcggaaatctcggccggttcgcgccgaggaagcccatctggctgcatcccaaatcgacacacaacgcacggaggccccggcgatcgccggggcctccgaatcatgcgcatcgtggaagcgaagctcttagaacatcccctggagcatgatgaacaacggggcgaacgtcagagagacgatggtcatgaggttgatgaggatgttcatggacgggccggaggtatccttgaacggatcgcccacggtatcgcccacgacagccgccttgtgggcctcggagcccttgccgccatgatgaccctgctcgatgtacttcttcgcgttgtcccacgcgccgccggcgttggacatgaagatggccatgagcatgccggtggcgacggcgcccgcaaggaagccgcccagcatggcaggattgaagcagccgatggcgaccggcaccacgatggcgaggcagcccggaagcatcatctcgcgcagggcggaagaggtggagatggccacgcacttgtcgtactcgggctcggccttgtactccatgatgcccttgatctcgcggaactggcggcgcacttcctcgaccatggcatgggccgcacgggacacggcgcccatggtgagtgccgcgaacatgaacggcatcatggcgccgatgaagataccggccacgatcagcgggtcggtgagcgtcagcgcgaagtcggggatggaatggtgcatcgtggcctggtaggacacgaacagcgagatggccgacaggcccgcggacgcgatggcgaagcccttcgcgatggcggccgtcgtgttgcccacggcgtcgagggcgtcggtgcggtcgcgcacctcttcgggcaggcccgccatctcggcgatgccgcccgcgttgtcggcaacggggccgtacgcgtccacgccgatggtgatggcggtgttggagagcatgccggtggcggccaggccgacgccgaacaggcccacggcgatgccgccgtcggcagcggcgttcgggaacgccatgttgccgaaggtgtacgcgccgatgatggcgagcgccaccagcacgatgggagcgatggtggacagcatgcccgtgccgatgccctcgatgatgaccgtggcggcgccggtgtcggcggcttcggcgatcttgtggaccggcttgtacttgtcggagcagaagtactcggtgatcttgccgatggcaaggccggcgatcaagccgcacagcaccgagccgaacagccacagcggctgagcctcgaccgactgggaattccagacggcgaacaggcagaagatcacgacgatctcgatgccggccgccacgtaggtgccgcggttgagcgccttgtgcaacgcggcgccttccttggcgcgcacggcgaacaggccgatgatggacgtgatgatgccgcagcccgcgataaggagcggagtcacgagagcccaaaccaagtcgcccgtggcgaaataaccgcccagcgcgccgaacgtggccgccaggatggtgggagccaggatggagccggtgtaggactcgaacaggtcggcgcccatgcccgcgacgtcgcccacgttgtcgcccacgttgtcggcgatggtggccgggttacgcgggtcgtcctccggaatgcccgcttcgaccttgcccacgaggtcggctcccacgtcggccgccttcgtgtagatgccgccgcccacacgggcgaacagagccacagccgaagcaccggtggcgaagccctccaccatgccgatgttctcatgcatctgcgcgacttcgacgatgtcgatgccgaacaccagcaagagcagccacagcgacaggcccagcagcgcgaacgaagcaacgcacaggcccatggtcagaccggacttgaagctgacgttcagagccttggcaaccgactgctcggcggcatgcgccgtgcgcgtgttggcgcgcgtggcgacgtgcataccggcgtagcccgcggcagccgacatcacgccgcccgtggcgaacgcgagcgccgtgatgggcgacagggcgaccgccatgatgatgccgacgaccaccatgaagatgacgagcagcttgtactcgctcatgaggaacgccttggcgccctgctggatcttgatggagatgctgttcatcttgtccggacccggatcctgcttcagaacccaggaaccgaggtaggccgccatgcaaatgccgatcagggcacacacgggagccatccatgcgactgcagtagtcacgtgtctcctcctttttccgttccaatacaatagtgcgaccttttcgccgggcattctaagcgggaaagtcgcacgcaactgcactattgtatgatatttgcagataatgtgaagtcgaaatcacggttttttgtcagttgggtcgaatcgcccggtcagcgcctagaacttttacaaccgtcggcggatcggactgcgcgatcgagcccaaaccgctatcatgcacttcttacccttgtttacgaacacgttacgattgcatatataggagtatctatgaccgtacgtcggcgcctcgaaacggcgctcgcatcggccgctgcgcttctttccaacctgcgcgctcgcctgtcccccgcgccctgcgacctcgtcggtgcggttctgtgcgccttagcggcgctgttcctgattctgtacgctgccagcggcttctccgacgcgccctggttcgccgtggcgggcgctgcggccgtgctgctgggctgcggctgcgcgctgctgctgcgcggccggcgctcccagcgggccttggagcgctggcgccttgcccgccccatcgtgctgctgctagcggttcccataggattctaccttctggaacgtccctggaacgatcagctgctcgccatggatccgttctacgccgcggtgaacctgtgcgttctgggcgcgctgttcgccatcgtgtacgcggccgggcagcgcacccgcggcgccgtcgtcgcattcttggccgcctgcctcctcgccggtacggcgaaccacttcgtcatcctgttcaagggccagcccatcgtgcccgccgacgtgttcgccctgtcgacggcggcctcggtgggcgcgggctacacgttcgcgctcgacgcgcgcttgctggcggccgtctccgtgttcgcgatcgcctcgacggccatcgccttcctgccgaaggtggcggccactccgcgtcgcgcggtggcgaacggcgcgtgcgctttagcgctggcaagctgcttcggctggtggataggaacgtacgacatcgaggaagcctatgcctgcacggtggatgtatggggcgtgaaggagtcgtacgccgagcagggatcgacgttgtgcttcctcaaacgcgtgcaggatctgagccctgcacgccccgaaggatacgatgccgatgccgtttcggacctgctgcgctcgctctcagacgatagcgcgagcatgccggacggcgccgaagcccctaccgtcatcgcgatcatgaacgagacgttctccgacctctcgcgctacccgggcttggccggcaccgacgcgcgtcccgcccattactacgatatcgcggccgaggcgctcgaagcgggcgacgcatacgcgtcggcgctcggcgggggcacgtgcaacagcgagttcgagttcctcacgggatcgagcatggggcacctcggcggcggcgtgtacccctacgtgctgtacgaccttgacggaacggagagcctcgtgtcgtacttctcgtcgctcggatacgccacccatgccgtgcaccccgccgagagcacgaactggcgtcgcgaccgcgtgtacgagcagctgggcttcgacgagttcgcagaccagcgggcgttcgcgaacgccgacacgctgcgcgggctcaccaccgaccgcgccacctacgactacgtgctcgacctgctggaagccgacgagggcccgcagttcgtgttcgacgtgacgctgcagaaccacggcggctacgacgtaggaggcctgtccgacgagcttgcggtgagcgtgcccttaggcgacggcagcaggtcgtcggagctggacgagtacgccagcgtcatacgccaggcggatcgcgacctcgcctacctcgtggatcggctgaacgctctcgaccgccccgtggtgctatgctttttcggcgaccaccagccgggcttcagcgattggctgttcgaggcgacccacgacggagctgcagcagacgacctggggctcgaggccgtgcaggagcgctacacggtgccatacctcatctgggcgaacgacgcagcccgcgcgcaaggcgcacacgagcctcagggcgtcgcgcacgagcgcacgagccttaactacctggggtcgaggctcgtcgaggccgcaggcctgcccacgacgagctatcagcgcttcctgctggccatgcgcgaagccgtccccgccatcaatctgaacggattcctcacggccgacggcatttggcacggattcggcaacgaggaggcggcgggcgtgctcgacgcgctgcaagcgtacgcaaccgtccagtacgacaacctcttcaacaaggactcggcctgggcggtgaagtaaagggctacaggttctcgcgcacccaggctatgttgcccttcacggtggctatcaactcgtccagatcgtcgaactttctcatagggcgcagccaatagagaaattccaccttgacgggcttgccgtagagatcgcccgagaagtccagcagatgcacctcgcaggtggcggtggcgcggtcggcgaacgtggcggccacgcccacgttcacagcggctttgtagcgcacgccgtcgacgtgcgcataggcggcgtacacgccgtcgcccagcggccgcatctgatcgggcacgacgaggttcgcggtacggaagcccatatcggctccttccccgcgacccggctccacgacgccggtcatgaagtacggacgtcccagcagacggttcgcctcttcaacgtccccgccggccaacagcaggcggatgcgcgtggccgtaatgggcgcgccgtcgtcgctcttcaggtcgtgcgcctgcacgctggtgccgcccacggccgcccacgagtcgagatcgcgcaccgtacccgccgcccgcgcgccgaacttgaagtcgtagcccacgtgcaggaaagacggaacggtgccgtcaaaggtctgcacgaggaactcctcgggagacgaggcggcgaaatcgcgggtgaacggcagcaccgcgacgacgtcgacgccgctgtccgcgagcatgcgcacgcgctcctcgttcgtcatgagcttcttgagccgcgttggatggaacacctcgtccggatcgatgtcgaacgtcagcgccacgctggcgccgccggtttcggccgcggtggagcgggcgcagtccagcaggtagcgatgcccccggtgcacgccgtcgaacacgccgaacgcgcacgacgtgcccttgaagaacccatggtcgaacgatgcgtcgaccttatatatctctgccacgagacacccccgtttgaaacacgcagcgcgtctcgaaccgagcgcgcccctcgtcgtacgcgtacagcgcgacgagcttgttgtcggtcagcacggccacgagctcgccgtcgcgcggcggctcgcagctttcgcgcacgcccgcggtgcaggcgcacatctcgatggcggacgtcgtcctcctgcgctcgaacagcggaagctccgcagccggaagctgcgccccgttcgccaccttcttcgccagatcgccctgcgcataggagaaccgcacgcccagcaggcgcaccggatcgagcgcagcgcggtccttgaggtcggccaaggtctccaggctcacgcactcttcaagcgtgagcagccccagctcggtgcgctcgagcgcggccacgtgcgccgggcatcccagcgccacgcccgcgtcgcgcgcgagcgagcggatgtaggtgcccttcgacacctcgaacgacacgtcccacgagggaagctcttccccgtccccttcgtgcacacctagcaaccgcgcgtcgtacacctcgatgtcgcgcggcgcgaggtcgatgatgttgccggcgcgcgcggcctcgtaggactttttcccgttcaccttgatggccgagtacgccggcggcatctgcttgcgtctgcccacgaggctcgccacgaatgcggcagcgaactccggatccagcacgcggtcgggcacctcgcccgtgcgcaccaccgttccagcggcgtcgtcggtgtcggtgcccgcaccgaacgcgatggacacgcgatagcgtttgtcgtgcccggtcagatacgcgcccagacgcgtcgccggacccacgcagatgggaagcacgccggtagccatcggatcgagcgtacccgtgtgcccgacgcgacgttctccgaagatggagcgacagcggttcaccacgtcatgggagctcatgccggcaggcttgttcaccccgacgaccagcgacagccccgatagcccccgtttcacgcgcggcacgccccctcctcatccgaggcgaacgtcgcggcaagcgcctcgtcgaccaaacgacgggcttcgtcgagggtgcaggaaagcgtgaacccagccgccgccacatgccctcccccgccgaacgagcgcgcgacggccgccacgtcggtgtcgtccttggcgcgcaggctgccgcgcaccacgtcgccctgctcgcgcagcatgcaggccacgcgcacgcccgccaccgagcgcagcgcgtcgatgatgggctcggcgtccgccttgaccgcgcccgttgcctcgaagtcgtcacaggaaagccagctcaacgcataggctccgcccgcgccgaacgtcatgcgctcgacagctatgccctcgagccgcacggacggcagcgtccggttctggaagatggcgcgcgacaccgacgccgggtcggcgcccgcctccaccatctcggatgcagcgcgcatggcagccgcatcggtgttctggtactggaagcgccccgtgtcggtgacgaggcccgtgtagcagcactgcgccacgtcgccggcgcgttccgcgcccaacaggcccgcgagctcccacacgagcatcgtggtggaggcggcgtcgggatcgacgtatacgaggtcggtcatagtggagtccaccgcatggtggtcgaccgtaaccgtcagatcgcagccctcgagcagcgcggcggccgcctctccgatgcgttcgcgagtagggacgtccaccgcgacgaacgtgcgggcgatgccgtcgaacgaagccgccggaaccagctcggccgcgcccggcaggaagccaagacgctcgtcgatgggctcgtctttcgcgagcaagcaggtcacgcgcttgccaagacccttgagcgccgccgccaaaccgagctgggagcccaggcagtcgccgtcagggctcacatgcccgcagatgatgaaatcgtcgcgcgacctcagcgcttcggctatcgcgccgaggtcggtgttcgtctggggcgtgaccgccatggagcctccctattcgccttcggatgcctgctgagcctgcgcctcgcggtcggccatgatatcggcgtcggccggcacgtcgctgtcggtgggagccgccaccttgttgcgcgccgcgtcgcgctccagggccgacgcgatgcgctcggcctcgtccacgctcttgtccagcaagaagcgcagctcgggcgcgatgcgccacgacagcttccgcgccatgagcgagcggatacggccggacgccttctggaacgccgccgccacgtcctcgtagcgatcgggctcagtggtgtagaacacgttgcacacgctgcggtcgtagctgacctcgcatccggtgatggtgaccaactccagacggggatcggatatctcgaacagcaggattcccgcgataacctcgcgcgcctgctcgttgaccttgcggttcgatgaactctgtttcatgatgcgtctccttaccgataaaggcgaaccttgcaggtggaacaaagggcttctagctaaccgagtgacctcggcagccgccgatcagccccgaagttcagcatatcgcgaggcgatttccccgaaaagcgcaacgccgccacggtaaccacaaggttgccatagcggcgttgcggggtggtgcccactaagcgagttccgcacgagccggacagccctgcgggctgtccgagcgagcaggactgtctgagcgactgggcattaccccgcgacgccgcggcgcaggttcatcttcttactcggtgcgctcgacttccttcacggtgtaaccttcgatgtggtcgccgatcttgaggtcctggaacttctcgatgccgatgccgcactcgtagccctgcttcacggacttcacatcgtccttgaagcggcgcagcgattccatgacgccctcgaagatgatggtgccgtcgcggacaatgcgcaccttgtcgtcgcgatggatctcgccttccacgatgtagcagccggcgatcgtacccaccttcggcaccttgaacgtctcgcgcacctcggcgatgccggtgtcctcctccacgatgtcgggggacagcagacccacgcgagccgcgttgatctcctcgatggcctggtagatgatcctgtacagacggatgtccaccttctccttctcggcctgctgcttcgacttgcccgtggggcgcacgttgaagccgatgatgatggcgtcggaggccgatgccagcgtgacgtcggtctcggtgatgccgcccacggccgagtgcacgatgttgatgcgcacctcggactggtccatcttctcgaacgcgtcgcgcagcgcttcgatggagccctgcacgtcggccttcacgatgaggttcaggtcggtctgcttgccctcctcgatgcggttgaacaggtcgtccaggctcatgtggctcttggattcctgctcggccaggcgggcgcgcaacgcgcgttcctcggccagcttgcgggcgtcgcgctcgtcctcgaacacgcggaactcgtcgcccgcggtgggcacgctgttcaggcccaagatctccaccggatcggcgggaccggccgaatcgacgtgcttgccatgcggatccaccagcgcgcggacacggccgtacgaggtgccggccaccacgacgtcgcccgggtgcagcgtgccgcgctgcacgagcacggtggccacgggaccgcgacccttgtcgaggttcgcctcgatgacgaagccggaggcctcggcgtcggggttggccttgagctccagcacgtcggcctggaggatgatcgtctccagcacgtcgtcgatgtgcaggcgctgcttggccgacacctccacgaacatgttggtgccgccccactcctcgggaatgacgccgtattccaccagctcctggcgcacgcggtcggggttcgcgcccggcttgtcgatcttgttgacggccaccacgatgggcacctcggccgccttcgcgtggttgatggcctcgatggtctgcggcatgacgccgtcgtcggcggccaccaccagcacgatgacgtcggtgacctgggcgccgcgggcacgcatggccgtgaacgcctcgtggcccggcgtgtcgatgaacgtgatctgcttgccgtcgatctccaccaccgacgcgccgatgtgctgggtgatgccgccggcctcgctggccacgacgcccgtgtcgcggatggcgtccagaagcgacgtcttgccgtggtcgacatggcccatgacggtgaccacgggcgggcggggcttgaggtcctcgtccttgtcgtggtacaccaccgcgtactcctcctccggagacacgacgcgcaccttgcggcccatgtcgtcggcgatgagctcgaccagctcgtcgctcatggactgcgtcagggtgagcacctggcccagcatgaacaggcgcttgatgatgtcgttgggctgcacgcccaggatctcggcgaatttcgccaccgtggctccctgggggatctccacgacagaatcgtcgagcaccagcgtgggatcgaggcccttctcgatggcctccagctccatgcgctcgcggttctcggcctcgcgcttctccttgcgcttcttacggcggccttcgccctcatgcgtggacgcggcggcgacggcggcacgagcctctgccagcaccttgtcgcgctgcagcttctcggcctgcacggccatctgcgcgtagcggtcctcgggctgggctgcctgctgctcgagctcgggcacgatctgctcgacgtgcccgccccgcttgcccttcttggccggacgctcgggcttggagcccttgcgcgcggcgtcgcgggcggcgggagcagcctgcttctgcgcctcgatgcgctgcttctcggcctcgatctgcgacagcagcgagtcgaacgcaggcttcttggcgcccagcaccggcgcgggcctcttcggcgtcgacgcgctcgaagcgctcttggagcccttcgcgttgcggttgcgcagcgcctcttccaccgcctgcttcttggccacctctgcagccatcttggcctggcgggcgcgggcgcgggcctcggcggcctcgcgggccacgcgttccttctcgctctcgatctggctcgccaggctctcgaacggcgaggaaacgggcgccttcttcgggccgccttctccgtcggcgccctgcgcgcgcccgtcgtcggacgagccttcggctcgctgggcgcgctcggcctcgcgggcggcgcgctcctgctccaccgcttcgcgacgggcgcgctcctcctcggcctttttgcgctcggcctcggcgcgctcttcggccagcttcctggcctcctcgtcctccaactgcccggcgcgctgcttgatctcgggctccaggttcttgcggatcttgtcgacgtaggcgtccgcgagcatgctcgcatggctcttcgcggggatcttcatctgctgcagcttgtcgagcagctctttgctcgacatatcgaattccttcgccaactcatgtactcgcatgctggccatataccactcctctacttctgtctcgcttcgcgcgcagccgaagcgacgtcggcggcgatcctgtcgtactcatcgctgccgagcgtcgccttgagcgcccggtcgagctttttcttcttgcatgcggcggcgaagcactcctcggagcagacgtacgcccccctgcccggcgcacggccggtcttgtcgaacgacacggcgccggacgggtcgcgcacgatgcgcatgagctcggccttgccggccagcttcccgcatgcgatgcagctgcgctggcgcaccgtcctcgtcgtcgtcattcctggccgccctctctcgctacccttgccttatgcttcgtcgaggtcggcgtgcacgccgcaatagcggctgcccggacgggcatggttgcggcagcgcaccccgtcctcgcccacgtaggcgcacagaccggcttcgtcgtccgcggcctcgtcctcgtcgatcagcatgttgtccatcggagccagcgactcgcccgtgaagctggcgctcttgatatcgatatgccagccggtcaggcgcgcagccagacgggcgttctggccctccttgccgatggccagcgacagctggtcgtcgggcaccacgacggtggcgtagtggttgtcctcgtcgatgacgacgcgggtcaccttcgcaggcgacagcgcgttggccacgtacaccgccggatcctccgcccactggatcacgtcgacgcgctcgttgcgcagctcttccaccaccatgcgaacgcggctgcccttcgggccgacgcaggcgcccacgggatcgaggttcgcctcgcgcgacgccacggcgatcttggagcgggcgccgggctcgcgggcgatggacttgatctccaccatgccgtcgtagatctccggcacctcgatctcgaacaggcggcggatgaggtccggatgcgtgcgcgacaccacgatggccgggcgcgcctgctcgccgcgcatcttcggcgcgtcggagttcgggtcgcgcacttcgatgatgagcaccttgaggcgctggttgtggcggtagtgctcgttgctcggacgctcgttgcgctcgttggggttgcgcttcacgtcgtaatggggcagctcggcctccacgccgtcgcgaatcttgatgatggtgaagtccggcgtgccctgcagcaccgtgcccgtcacgaggtcgcccacgcggtccgagaactcttcgtagatggactgacggccggcttcgcgcacgatggacgcgatgacgcccttggcgttctgcgcggcgatgcggctgacatcgtcgggggtgacgtcgcgctcctcgaactcgctgtactcgccggtctcctcgtcgggctcgcccaccggcaccagctcgtacacgtagatgtggcccgtctggcggtcgatggtcacgcgggcgtcccactcgagatcgaggatgtgctggtagctcttggcgagcgatgcctcgaggcgttcgatgaggtagaactcgtcgatcttgcgctcatgcgccagcgcctgcaacgcctcaatcagttctgaacttgccacgtcttcgcttcctttcctcagatgctcgtctgcgagccgaaatcgatcgtgcccttcagatgggcgcgtttgatggtgtccatagggatgcgcgcctcggcgccgtccacgtcgagcacgaccacgtcgccctccaccgatgcgatggcgccggtccagctgccgcgaccgtccacgggctgcgtcttgagcaccgccgtatcgccgacgaaccgcgcgaagtgctccgcggtgcgcagcggccggtcgatgccgggcgacgacacttccagcgtgtacgccccggggaacgggtcgagctcgtccatgaggtcgttgatccacgcctgcgcggaggacagctcgtcgaagctcacgccgtcgggcgtgtctatgtacacgcgaatcgtcggggccttcttcgcgcccgcgacctccaccgtgacgatctcgacgccctcctgctccgcccggggagctaacgcgtcgagcagctgctgttccttcttgctgagcacgcgcctcctccttcccgtttggtttcgcttcgccgccccatgctctcacgccgcggagcggcgagcccttacaaacaaagaaagcgggaacaagcccactttctcgtgtgtcgaaagtatggtgcgcgaaaacgcgcttgcttctttgtcgtgccgtgtatttataccatatcggcaacgctttgcctaggccgctcaccaggcagcgcgcaagttcaccacattttccgcgcctcggcgggcgccccttgcgcgacgggagccgaaaccttgcgagcacatgcgcatcatcggccgaaagacacggaaatcggctggaaaacgtgtttttcggccgatgatgcgtcgctcagccgtccaagcgaatgacgatgcgcacgacggcgactccgccctcgacgtcggcgtagagcgcgccgccgtggcgttcgacgatctggcgcatggcgggcaggcccagaccgtggcgggacgcgtcggccttggacgtgcgcgagaacgacgcgccggggacggccgcgttctcgcatcgcacggccaaccgtccgtcctgcgcgcgcatggaaagcgagacgaaaggccggccggcgccctcggctcgcacgcgctcgcacgcctcgacggcgttcgacaacaggttcgacagcagcacggacagctcggtgtcgcgcaggggaagctccgcgggcacgcgcgcctcgcagcgcacctcgatccccgccgcctgggccggagccaaatacgctgccatgaccgcgttcgccaccaagttgtcggcgtagcgcagaggggcttcggcctcctgctggccggacagctcgaccagatacgctctacagcgctcctgctcccccgcgtcgatcaggcggctcagcgcggccgcatgatgacgcaggtcgtggcgcgccgccctcgtagcctcttcgcccgaccgcagatggcgcagccccgcctcggccgcacgcacctgcacctccagatcgcgcacctgctcggcggcgaggcgcaggcggcgcacccgctccaccagcatccaggcgaacacgcccacgagcagcagccccgcgtactcgctctgccacaggccgtacataggctcgtacgcgttgttgtcgagaaggttcgccacgagcgcggcgcccagcaccgcgcagccgcacagcacgaagcgcgcctcgtcggtgcgatcgcgcagcccgacggcggcgcatacggcgaacagcgcccagcaaccgacgcgcacggcggtctggtacaggccgtacgcctcgatgccgcccggcagcgccgggatggacagcgcccaggccagcgtgacgaccggcagcgcccacagcgcgcgggccgtccggcgaacgagggggcgggcatcgcgcgtccacgccaaacccgcggctcgggcggctaccgacacggctgagacgagcacgcacgtccaggccgcgtcctctacggcataccaccaggctcctgctgcgcccagatgccagaccaggccatgcgcgcccgccacggcgaaggcggcgcacagcacgccgaagtcgcgcgcaagcgcatcgccgtcgcgcttgcggcgcaccgcgaacgcgaacagcgccgcggccagcggccccagcaccagcacgcaggcggacagcgcgttcgcgaacgagacgttcgccatctgctgcgcggtgcccagcacgggcgggtagaccagcccgctgtagtagtgctcgtcgttgcgcacctcaaggcgcagacgcgtgtcgcggtccgccacgatgccgacctgcgccccgtctccgccggccgcagcaacgaccccgtttacgtacaacgtgaaatcaccgtacacctcgggaaccagcagcacgagggcgcgttctcgttgcgcgccgacatagctaagcgtcagctcgtacacggcggagccgaaagccgacgtgccgccgggagcataggagaagttggagtactggccgatgaaggtttcggtccgcggcgccccgtccacggagagcatccaaccgtccacgagcgggacgagacggtcgagatcgtcatcggacacctcgataacgccgtcggagccgtagggcggcccgaacaggtatttgttatcatagtggtacgcgatcgcgaacacgcatcccgccaacaggaatgcgaccgcggcgtgaaccgcgaagcgatgcacagggcgatgcggcatgaaccgcctttcaggacgacgaggagcttgcatggagcatggtagcagaaaacgcctcgtgcgagcattggcgtgcacgaccatgatcgcgctggcgctgtcgccgggtctgccgggcgtcgcggctcacgccgacgtccgcgaaggcgacgcgcgcatgatggcgggcggcggctccgtaggcgggggcccgggcgccatcgaccacgtcgacaagccgttcggccagatcatccgcatcatccccgatcacggcatgtcggctttgctgtacctgccagccctgccggtggatccgtaccacagcgacgaggaaaccggacatcccgcattgcagacgattcgggtcgaccgcgcctatgcggacgacccggactcctgggaagcctggggcaccttcgaatgggacgcggattggcaggagtacgcctggggcctcgacagcgtccaacccgcgtacgacgacaactacgccgatcccagcatcctgtactgcacggtcagctactcgtccgagaccgtcgactatcgcgacttctacctccgcgcgaccgcggtggtcctcgaggatggcgtgcaaaccactatcgagttcgagccggcgctgttcgaatacgccgaggagtggcttcccgaacccgtcgagccggtcgacccggtcgagcccgaaaaccctgcagagcccgagaaaccccaagaaccgcagaaggagccgccgaccgtcgtgaacccgcccgacgtgaacggcggcgacagcggagggaaccgcggaggcgtgggccagggggaaagcgagcggaacgaggcgagcgaagaacggccgaagaaagacggcttccccgccggcggcaaccctgtctcaacggcctcgatcctgccgctgccgcgcaacgaggagccggccgccggaacgcaggacggcgacgggacgcaagaaaacgcgcccgacgagcaagccgggcgcgcaggggaaagcgatgctgcaagcaaggaatcgatgccgggaaaggccttcgccgattcttcgacaagccgcgattcggcggcgacctccgcgggctcgacctcgtcgggaaccgcgcaccgtatgcccggcttcgccctggccatcggaggcacgatcggcgccatggctttgatcagcggcatcgctgccttcgcaagagcacgtagaaagcgctagcgacggcgggagcgcagcgctacgaccaacacaacggctccggcgacgagggcgacagctacgcaacccgccacgagggggaacaagccgtcgccggttgtcaccagcgctttatccgagccggagggagccccggggcttacgttcgtgccgctcggaagcttctcggggctcggcttggcgttcgatccgccggtcccttcaccggagttttctcccggattctgcccggagccttccgagccgtccccggggttgccgccagacccgtcgcccgaaccgtcgtcagggctcccgcccggcgtgccgccggggtcgcccggctcatcgggcccgaccgaagagccggaagcgaccttgacggacaacggagccggcagctccatgcccagctgcttctcgtccatctccacatgcgaggagcttacgacctcgaggctgctcacggacacttccgcaacggaatcgctcgaagacgacaacgcgagggttcccagatcgagacggtcgcccgagaacaggttcccgtccttgacggccacgtagaggttcacgcgctggccaccgtccaccggcttgaagcgcacctgcgccaccgcggcgccctcgaccgccttcgagaagccgaacccggcctccagcgcctcgccgccctcgcccttcaccgtcaacgacagcttgagcgcccgaacctcgtcgcctcccttggggacgaccaggctcacgtcgaccgaaccgttcgaggcgccctcgtccaggaccacgccaggcgcctcccccgcccaggctattcccggggcaagggccaggcagagcgcgcatgccgccaacgcgcccgccgtcatcttcttcatcttcgcaaacatatcttcaaccgttcctctcggcttcaggctaatcggctgcgacggtcgcgttgccgccgagctcgacgtcgggcagattgtcgggaacatcgcccggaagcgagtcgctcaccaggcgctgtccctcgttcgtcaacgcgttgtccacgcggtacagctcggcgcgcacctgcttgggcagcttcatgctcgcaaggtcgccgggctcgatccagtagacccagcttccttcggacacgtcgcccagcatggcgtcgccgggctcaggcgccatgatgatctggctggcaaccgtgctgccgtcggcgttcacgccgcccaccacgttgccgttctcgtcgtagagcaccaccacgttgtacgccgggttgcccttgtacgagccggtgaacacgagcgagcccttcgggatgaactgcttgtccaggttctcgtcggccttctggtacacgaagtcgctcttcaggatgcctgccgcgccgccgttcgcgtcgaggaaggacacgtcgtcgcccgagggcccgaacacgtcgagctcggccaccgacagctgcctgcccgcccggccgacggccgtgatgcgcaggtagcgcgcgtcgtaggtgcagatccagggatctttgccgttgtcgaagtacagcgatgccctgccgtccttgtcaagcgacagcgcgccctccttgatgagggtgtagttctcgccgtcgaggctggtctcgatgcggtagtccccgatggccgaactctcggcgccggcacccagcgtgtagcgcagcgaggtgacctcggtgggcttgcccatgtcgagcgtgatgacggggtcttcgccgtccgacgcgcccgtgtacaccgtgtcggccttgccgtccaccatcagcccggaggcgggcttcggcgcgggggcgtcgggatcgtcatcggtggcgggcgggaccgagtcctgcgcggaggacatgttcgtggacacggtccagccgctcttgtcctgcaggccgttgcccgtgagcttgatcggatcgagcacgagcgccttcgagcggttcaagaacttgtcgacgaccgtcacctcgtaggacaccacgcggttgcccagcgaggaggcgttgtcgacgtacgaggccgtgccgtcctccgcagcctgcgcgaagcccacgacctggcgctgctgcacgccgtcggccgtggtgaggcgcgcgatctcgtagcccagcacggaatcgcccgccgacgcgtcggcgccgagggagagcgccacctcgctgccgttcgcctccgccgccgcctgcgcgacgtccttgtccaggaccgcgcccgtgtcctcgtgggagcgggcgtaggtccgggcgtcgtcgttggcgtagctcagcgcacggtcctcggccgggaactggctgacgtaggccttcgtggcctcgtcggccgtgaagccccaacgctggaagaagtcggtcaggtcgcgctcggccgcggcgctggccaggcggatgatgttctgcttctcgccgccgcctaggacaagctcggtccccttgggcgcgggcgccgtcttcggagcgcgggcgtagctgtccacgcgcgcgaagaaacggttgtcaaaggcttgctggtacgtgtcgtacagctggtacgcgccgccggcgtcgtaggccagacgcagctgccagtacatggccagctgcgtgaacacgctgccggtgcggccctcgtcgcccgaggtcacgcggtcgtacacgtcatcgtagctgaaacgcgccgaggcgctcgtgccgtcggtctgcgacagctgcgcgaagtagttgttcgtcacctcggagtaggcgtactgggcctggttgatgttgtgcccgatctcgtgcgcgatgccccatccgaagtacgacccggaagccttctcgccgtcgccgtccaccgcgaccggagaacccttgccgagccccgggaccgaatcccactcgatgccgatgtggttgcccgccgcgtacatgaacgcgcccgcgaacatgcgcgtgtagcggatgttgagatgctgcgagggcagcaggttgctcttgatcacggccgcgtcggttcccgcgtcgaaggaatcggccaggcccttgtgctggtagaacagctccatcatctggtccatggcgtcgaacgaggcgagcagccgagccgcgcgctcgtcggcggtgcccgaacccgccccggccagcatctgctgggccggtaccgagtacatcatctggtcgagcatgacgtcggtggcgttcaggacgcagttcttgggatcgtagccgtagcgcaccgccgcgtttccgccggctccgtgcagcttgccgtggctctcctccaaggccggcacgtaggcctccagcgcctggacgtaggccgtggtgcgcgcgaggcgctcggccgggtcgtccacctggtacagatccagcacgggcaccgcctgggccccgctgacgcgcacgccccaatcggcggcatcgttatcgcccgtgtactccacgtacagctggccgccgtgttcgacgtcgagcgacgacaggctggggatcgttatctcgttgcggcccaccttgagcgtggcgatggtcttggacacgttgctggactccggatgctgctgcgacaccacgaggcgcagcggcgcctccttgccggtgaccgctcccttcgcgcccgtgtacaccacgatctggtcgccctcggccaccacggcgcccaagggctgccaggcgttcaggccgctgatgcccaggctgcggttgtcgcgcgccgaggagatgccgttgtgcacgcgcaccgttccctcgaggccctgggttgccagcagcttgcgggcgttgtcaagctccacctgcagctccacgcggtacgggttgaactcgccgcttgccgggtcgggcgtgtccaggcgctgctgcagctcatccaccgccgcggaggtcacgtcgtctttcagctcgaggtgcaggtcgtcggcgtacagcgccatgatgtcgttctccaggctgtcgtaggcatggaagcgcatctcggcgaccacgacgttgcccgaggaccaggaatggcccatgccgatcctcaccttggacgaggtcacgggctgaggcagcttcgccagcacgtacttgcgcccgttctcgcccgtgcgcatctgcacgttcgcctggacggtctgccaagcgccggcgtcgtcgacgtaagagacgctgaccctgccgtaaggaacgccgtcctgaacgtcggcgaacgaaaccatgccgagcgtctggggctggtcgaacgtcaccgtgacgcccttgccgagcgcggggtaaaagccgccctcgtcccagtcggccactttgagatacgacgcgtagtcgtcgtcgaacaagccgtaggcgctttttgcctcgcccgacgtttcgtccagcgggctgtcgatcatggaaccgcgcccgtaggttgccgagacgatgcggttcaggtagtcgccatccgcgttctcggtgttaaccaggcggtaagccggcagctgcgccggcttgacgttcgccgtgcgcacgacggccatgaccgaaggcgcgctctcgccgatctcgttcgcaccggtcagatacacctggtactcggtatcgtccttcaaaccgtcaacggagcaggacgtcttcgtcaggtcgggcaccttcgtgaaatcgccgccctcgtcgcccttctcacgatagaacaggttgtacgaatcggtgtcctccatgttcttccagctggccttgaaccctcgataggcgccggacagcgagatgccctcgggcgcgtcgggaaccttctcggccttcggcgtgacctggacgctgccgggccagtcgctgcgccaggcgccgttcgtggagcgaaccttgagggtgaacacggtgccgttcttgatcttctgctcgtcgaactgcgtgacggaaagcgaggtgcccgtggtgcgcttgacctcttccctgccgttcgcgctgatggagagttcgtagcccgtcacgttggtctcgggcttccacgagacggagaactgcttgctgcccgcgacggcggaaagctcaccggggatgctcagctcgggctcggggatgcgctcctccatgttgttgaggagctccaccttcgaaacctcggcgaggttcgtgttgccctgcgtcttggtgatgacgagcgtgaccttcttgacagcgatctggccgccgaagtccaccaccaccgtgccgttctcgtcgatcacggccgtgggcgcgctggagcggaagaaggccgcgcgagcctcggcgcgggagatgccgatctcgcggacggtgccgtccgtcagctcgaccaagaggcggcccgcctcaggggcatggtcgccgctggcgggcacgttgatcaccatgccgcccagctgcggggcttgttcggaatctttcgccaggtcgaaggacacttccaccggatgctcgtcggaaatggcctccgaggccctgagcgagacgggcttcgcgtcggcgcctaccacctcgtcgaggctgccggacgccacctcggtgccctcgcccggcgccgcctcgaccgccgcggggggcagcgagcgcgccacggtggcctccaccgcgacgcgatcgaagctggacacggccgtctcgagatccgcgagcgacaccgtgccgtcgccgttcgcgtcgcaggcggggcttgccgcgcccgcctctatgtcgtcgatgatggcggaggcgtccgcatcgtcgaccgtgccgtcgccgttgacatcgccgggcacgagcacgccgatgcgcgccggagcctgcgggtcggcggccaggtcgcccacgtacagctcaacggcggaggaatcgcccttgacgtcgatcttctgggagtacggcgcgatgccgggcgcgcgcacgctcagcgtgtaggaaccgtcggccagaccgtcgaatcgcgcgaccgaccaggagtcgccttcaagggaaaggttcagctgctgcgcgccgacctgcacgccgtcggagtcggcgagagccacctcgtaggcggtgccggccgtcgccgccggacggccctcggtcagcgtcacgcgcagctcgcctgccggcggggcaacggcgctgcgcgaagcgttttcagcttgcaggggcgaagccgtaggctccgttgcgttttcggttcgggtttgagatttggatccggaagcctcggcggtgccggatgcgtccggaacctcgtttccaggcccgtgatcggcttcggggctctgattcggcgccgtctcgtccgcctggacccgtccgggaggggcgggttccgcatcgctttcgacggcgtatgccgggatggtgcacaacgaagacgccaagacgacggcaagcgccgccgacaaggcacggtgggtgcgtttcatgttcgtttccgtttctcgccagccattacgtaggttgcgggaacacgcccgcaaatatgcgacgagaataataacatacggtgacggagacggtggccgaattgccggcgaaagcggggagaatatcgagaacgaggcgaaagtgggactgggagatggagctgacgactcgtttggccgcaaagcgagtcttcagccccgtccccctgcctcattcgggagggccgcaccggaatacgcgccctcccctaaaaagaacggcttgctacttgcctgctcgcaccagctcttcggccatttcgcgcagcttgaacttctgcaccttcatggacggggtcatagggaaatcgtccacgaagaacacgcgcttgggcaccttgtagcgagcgatgcgcggaatggcgaaggcgcgcacatcgtcctcggtcatatcctcgtaaccggggcgcacgcggacgaacgcgcccacgagctcgcccagcttcggatcaggaatgcccaccacctgggcgtccagcacgccgggcatggtcaagaggaagttctccacctccaaggggtacacgttctcgcctccgcggatgatcatgtccttgatgcgcccggtaacgcggtagtagccgtcctcgtccaccgtgccgaggtcgcccgaatgcaggtagccgtccgcgtcgatggcacgcgccgtctcctcgggcatcttgtagtagcccttcatcacgttgtagcccttgcagcacagctcgccaggctcaccaggtccgcagatgcggccgtcggcggggtcgatcacgcgcacgtccaccggaggatgcttgcgccccaccgtctcgcacttgtgctcgatgtcgtcgtcggcgctggtctgcgtgaacacggggctcgtctcggtgaggccgtagcagatggtgatctccttcatgtacatgcggtccatgacctcgcgcatggtctcgggcgggcaggggctgccggccatgatgcctgtgcgcaggctggacagatcgaacgtatcgaagtcggggtggttgagttcggcgatgaacatggtgggcacgccgtagacgctggtggcgcgctccttatgtacggcctgcagcacgagccccgcgtcgaactcctccacgatgatcatggtggagcggtgcgtaaggttcgccatgacgcccagcacgcaaccgaagcagtggaagaacggaacgggcagcgtcacgcggtcgtcgggtccgagcttctggccttcgccgatatagaagccgttgttcaggatgttgcggtgcgtgagcatgacgcccttcggaaagcccgtggtgccggacgtgtactgcatcatcaccacgtcgttgttgtcgaaatgggtttccgcctctgccaacgcctcttcgggcacatggcttcccagcagcacgagctccggcacgctatagcagccgcgatgcttttcgggacccatgtagatgatgttcttgaggaaggggtagttctcggactccaggtagccgcgctgctgcgtgagcgtctcgggcacgagatctcggatgatcttcagatagtccacgtcgcgataggcgtcgatgacgcacagcgccttcatgtccgactgcttcagcacgtagtcaagctcgtggctcttgtacacggggttcaccgtgaccatgaccacgccgatcttggccgtggcgtacatgaacgtcagccagtcggggatgttgcgcgcccacacgccgaggtgatcgcctgggcgcatgccgatggcgagcaagccgcgcgccaggttgtcggtgcgctcgtcgaactccttgtacgtccaacgcaacgcgcggtcgggatacacgacgaactcgtgatcgggatctacagccacctgatcgcggaagtagcggccgatggtcttctcggagtgcagcgggtagtctggatcgcccgggacgggggcggtgatggcttcggtcgtcatgttccctcccctagatcggcgtgtacacgacggccaggaacttcgccttctggccgtcatgggcacgcacctgatgaggcacgatggagtcgtagtagatgctctcgccgggatgcagcacgtacagctccttgccgtactcgatctcgatgcagccctccatgccgtagagccactcctctccttcgtgccccaccagctcgtgatcggcttcgccggagggatccaccgtgatgacgaacggatccatgtgacgcgaagggcgcccggctgcaaggctgaagtagctcaagtcgccgcccgaagtcgtttcgaggctcttcgtgcgctcgacctcctccatctgatcgcggtcgatgtacgcggggcccagattctcgtcgtcgtccatgagcgtgccaagacgcacgcccaacgctcgggtgatcttgatgagcggcgcgagagatgccggcagctcgccgcgctccaagccctcgatgaccgagacgtcgcatccgcaacgatccgccagatcccggctcgacagatggtgggcggtccgcagggtgacgatcttctctccgagcctgttgtcatccgccatagtgcgctccccttttctctcgtcgcaacaatgcatccggataattatcccccgttcgcgtgccgtcgcaacgaaaaagcgccgaacggccatctttcgcttggtcaaacgcttgcgagaaggcttggaaacgcccggaaaactcgcgaagcgtcccgcatgcgaccgaaggcccttccatcctcgctctcacaggatggaagggcctctggaccgacccggggcgatgcctttgggcggacggaagctagttcttgaaaagctcgtgtttgagctcttcctcgtccttgatggacagcgaggtttgcagcacgtcgccgccgaacggtcggatggcgtcgatgaacttgtcggtggtcatctcgtcgaccaccatgaacacggcggcgctgtcgtcggtgctcagcaggttgcgcacgcgatcctggaagtccttgtccacgccgtgcttgacgatggcgcccgtcagcgcgccgatgcccgcgcccagcgccgcgccgacgatgggcacgaagaacagcaggccgaacagcacgccccagaacagaccccacaccgcggaggttcccaccttggagccgggcgtcaccacgtcgtacttgccgtcggcgcgccgcgccacgactgcgacggactgcaggctgacgatgaggttcttgtcgagatcgaggatcttctggtaggcggacttcgcttccgcttcgctcgggtaaccgagcacgatgagcgtactcatatgatggagctcctttcgatgcgttcgaatacggctccactctaagcctccgcaagcccctacggcgagaagtgttgccgttcgccatcggttcgataccgtcgcgtaagccggccgctggccgcatgggaaggcatgaggccgagacgcgcttgcacggcggcatgaaaacggccccgacgatctttcgatcatcggggtcgcgaacatcttgcaaacgattccgtcaggacgtgcggttcctacccgaaccggtactccacgcccatcgtgggccgggggttctcccacttcttgacgatggtgccctcgcaggcgatgcggcaggtgccgcactccaggcagcccgcgtagtcgaaggacttcttgccgtcctcgtcgatcttgtagagcgccgccgggcacacgcgcacgagcttcaggaactcctcgatgtcggggtcgtccacgagctcgatgtgcgcgctctcctcgtccacctcgtacttgtcgagcgccaggtactcgtcgacgttgaccgtgatctccttgacctcgctcacagcgacttcaccgccttccgaacctcgccggccagcttgaacaggccgcgctgcttgactatgggcatcatgcgcttcatcagcggcttctggggttttccgtccacgctgaacatggcgttgaagacgtcgcgcgccatggccgggtactcggtgaacatgcggtcccagccctccatgacgtgcggccacttggagaaggtgcgcaggtcctggatgacgaaggagccctccatcgcctccttgtaggaggcgagccccgcctcgctcgtgtcgcccgcgtcgagcgcgcgcacggccgcctggcccgccatctggccggaggccacggcgaagtccatgcctcgcacctggtagcccatgttcatgcaaaggccggccgactcgccggccaccaggcagccgtcgaacacgtacttcgggaccatgccgtagccgccctcgggcaccatgtggccggagtgctcgacgagcttcgcgccgcggatgacgggcgccacggccgggtggttcttgaaatcctcgagcatctggtacaccgggtaggggttcgaggcgtccatggccgtggagacggttgccacgaggccgagcgagatggagtccctgttcgtgtacaggaagcctccgccgacgtttccgtgcgtgcagtcgccgacgaacagcatcgccgcgccctcgccctcgggcacgaggaagcggtcctcgatctgggaggccggcagctcgaacacctgcttgatcccgaccgccatctgggagggcttcgggcgggggttgcccaggctgcgctcgcagagcaggctgttcacgccctcggcgacgatcgtcgcctcggcggtgatctcgtcctcgccggcgcgcacgccgacgaccctgccggacccgtccttcaggagctcctcgacggcgatgccgcagatgtactccgcgccggcgtcctcggccttcgaggccagccactggtcgaagggcgcgcgcaggaccgagtaggagtccttgccctcctccgcgagctccgggctcgtgaagtcgaccgccgtctgcgaggccgggtccatgagcgcgatgcgctcgtgggtgatcttgcgctcgagcggcgcctcggactcgaagtccgggaacaccttcttcagcgagtgcgagtagatgcgcccgccggtcatgttcttcgcgccggcgaagttgccgcgctcgaccacgagggtcgacttgccggccttcgcgagctcgtaggccgccacggcgcccgcacacccggagcccacgacgatcgcgtcgaaatcagccatgtcctgtcctttcctatcgttgcgtttccgttttcttgccgtcctgcaaaccgtcgcgccccgaacgaacacgatcccggttcggagcatcccgcggttgcgtttcctcagccctgccgaacgcgacgattgtcgcgaaccgttgaggccgccgtcccgagcgcgcgaggtgggcgcggagcgtcgaggccgcgacgagctggcgaaggtctcgtcgggaggcgaagggaggatgcatccgccccgcttccacctgcggcgctcgggacggcggcctgaccggctgcccggatccgcgaaaaacgcggatccgggcagcttgccgccttcggcttacagtgccgccgccagcttcggcaggacgtccttgatgtcgcccacgatgccgtagtcgcactgcttgaacaccggagcgttcttgtccttgttgatagcaaacatcgtgccagcgcggttgcagcccaccatgtgctgcatctggccggagatgccgcaggcgacgtacgccttcggggacagcatgaggccggacacgcccacgtacagctcggtgggaagccagttcacgccctcggtaaggggacgcgagcaggcaaggcctgcgcccagcttgtcgcacagctcgcgcgccaggtcgagctcggactcctcggcgaagccgcggccggcggccacgacgacgtcggccttgttcaagtccacgccgctcttctcgatgggcttggaggagaccagcttcacgggcgtcgccggagcgacaaaggcgacgtcctcgacggcgttcgcaccggaggcctcggcgccctcgaacgcgcccgcgcccaccgtgtagatggccacgtcgcctgcggccttctgcacgcgctcggccacgccgccgaagtacaggctgacggcgccgttctcgaaggacatgacgtcggtgatgacggaggcgttcgcatgggcggccagcttgccggcgatcgtcttcatgtggcgcgtgggctccacgagcaccacggccggagcctcggcgtcgaacaccgagatcacggtgtcggcggcgtcgtcgaggacggtcccttccggcacggagatgcgggcgatcttatcggcgacggcctcgggggcctcgccgaaggagacgagcacgacttcgtcggccatggtgcgagcgccagcgcaaagctcccgagcggcatccgtgcgttcagcgataacgagtactttcatgaatatcaactctgcctttctattgcataaggggatggtcgagggaacttacagcgcggccttgagggcggcggcgaactgctcgatggcgccgtcggccgaggcttcaaggatctcgcgcttgcgatcagcctgcttgggggcgaggcaggacgcgacctcgatggagctctcgtacgcgccgtcggcgcccgccacgttcatcggcttcttgccggcggcgaggatgtccttcatgccggggatgcggggcagcgcgatgtccggcgcgacggacacgacggccggaagcggcacctcgacgacctccaccacgtcttccagcgtgcgctcgacctcgagcgcgccgtccttggcggtaatcttcgtggcggcggtgaccacgggcagacccagcttggcagccagctgcacgtccacctgctgcgcgtagttgtcggcggagccgtcgccgcagaggacgacgtcgaagtcgcccaccttggaaacgagttcggcgagcgcgacggcggtggcgcgggcgtcaagtcccttgcatgcgtcgtcggcggtcatgtacagctcgtccacgccgcgggcgagcacgttcttcttcaacttggagtcgtcgatgtcggcgcctcccacggtaacggcgaccacgttcgagccctcgttggcggcggccagctgagcggcggcctcgatggcgttcaggtcgtaggcggacacggtgttcttcgccttggagtagtcgagcgttccgtctgccgacacctggatatcctgatcgtcgggaaccaccttgaaagcagcaacgatgttcatcctgtacctttcccttctcgtttgccttacttttgcatgcaagtcgttggccgggcgcgcctcggcgccttcctccgatgcttcggaaggcccggggcccttcccggcgcgttgatgacagtttgccgccctgtcatcgccccgtcatcgcaaaatcgctgtgaaaccctcattactcaacttttgactatgcctgcgcgggctctgcggacgggggcgccggagccgtccggcggcggcgcgggccaggcggcgcggcgagccctttccacttggtcgctaccccggtttactcggggctactgctttttttgcgatgccccgcttgcgcagtatcgtcgaattactgcgctgcttgcgatgcggccgatacctgacgatccctatgatggaaccagatttcaggcgcgtcgagcctcccgctgcgccgtgctgcacatgccgcagcgggaggcgagaccgcttgggaaacaggcgtgagatcgcaacaatccaaggaggagcaatggcagattactatggcaccgacaccgtcgtatccgaacttcgcgaggacggcctgctgatcatccgcatcaaccgtcccgacgtggcgaacgccctcaacggcgtcacctccaaggccatggagaacatcatgaacaacgccgagaccgatcccgcggtgcgcgcgatcatcgtcaccggcaccggcaaggtgttctgcgcgggcgaggatctctccgagctcagcgaaggcggagagtgccagaccgtgaccgagcacggcttcggcggcctgaccgcgcgcctgtgctccaagcccgtgatcgccgcctgcaacggctccgcggccggcggcggcatggagatcgccctgtcctgcgacatggtggtggcctccgagcgcgccaagttcggctgcaccgaggttggtctgggcatcatcgcctccaccggcggcctcgtgcgcctcgcccgcgacatcaaccgcaaggactgcatggagcttctgctcaccggcaagaagatcaaggccgatgaggccaaggcgctgggcctcatcaactacgtcgtgccggccgaggaagtcatggacaaggccatcgagctggccgaagagtgcctgaagaacgcgcctctggccctgaagtggacgaagtacatcgtgcacgccgccgaccagatgtccgaagaggacgccatgcgctacagcgacgccgcctaccgcttcctggagaagaccgccgacggcatcgagggcccggccgccttcgtcgagaagcgcacgccgaactggcagggcaagtagctccttcttggctttcgtccttgaaacccccggacgcgcgtccgggggttttcgctttttccagcgcggcagaggcgtgcgatcggcgcggacgggtcgcatccatcgcgaatcggcgcggacgggtcgcgcgagatgcgcatccctcctcgcgtcaaaaaagcgaggcgatgggacggggccaacgtctcattcctccaactcccccgtcagacgttccttccaggtgagcttgcgtggcgcgaaggggcttggcaggggcacgtcgtggccgatggagcgcaaggcgatgtcccacagcgtgcggcgcccgccgaagaacaggtagcgcttctcgagctcgggaagggcctcctcgtccgccgcgccgctttgggcgaagccgtcgaggatcgcgtcgctctcgcgcttcgccttcgcccgacggtacgccaccacggcgttcgccacgaacacccccacggtatagggcagaacgaaggccttcacgagcgccaccaggtcgtcggtgcgatagtcggccagcgcccgagccttgtcgcccacaaggtcggggtcgacgacgtgcgcgagctgcccgctttcgccctgcgccgcccagcgctgcacgtccaccagccacgcgcccgcgaacacgatggctgcaccggagaacgccaccgccgcaaggccgagccctttgaaccagcgcgcaacgctgctcatccagtagtacggtaccgtataggcgtacagcagcaggagcacggcggcgaacaccaccgaaccgccgatgatcacggcgtcctggcgcacgaagtagtccgtcgccgatccgagcacgcgctggacgtcgtagacccaggagaacccgtcagcgacggccgcctcggcaggccggccgatggagcccgcgagcgtcgagatccatgagagcgccatgccgagaaccgcgacgatgacgaagaacgccggcagggtgaccgcgatgctggccaggccgcgcgcgagcccgttgtcgaagcgcagcgccacgtagtagagcagcagaaagcctcccagcagcacggcggcgaatcccaggtacagcgcgatggaacccgacagctccgcacccggcagaagcgcgagcgcagcgcgcgagacgagcaacgccgccgacagacccacgagcgcgatgcagccgagcacccaggcgcgctgcagccgatcggtctcggtgtcgaggcgcgccgtgccgttctcgtcgacgagccgcacgaagtccaggcggtggatgcgctgcgatacgcgcaccgccttcacggcgagcgcgagcgcaggcggcaggaacagcgcgagccccgcgcccgccggcagcgcaaggcagagccccgcgtaaagctcgagcggcagaccccagcggtaccccgtgtcgaaaggccggcgcgtccaggcgcccaaccgccgggcggccgaacgaacggcctgcttgctgtcgggaaggcttctcatcatgcatccagtgtacgatcgccccgcccgccggacaagcaacggctgcgcaaccccgcgcgagaggagcaaggaagccgttcgatataacgggaattccacgcggctccaacgcggatcacccacggatccaacgccgtttccacgtggatcacctacggatccaacgtcgttccaacgcggattccacgtgccataacacctggtaaacagctggtctgcacgctcgtaacacatcgaagccccatgctaccctcacgtcatgaacagatatctcagtcatacttccgcattggaatggcttgcatacgcgaaggccgatccgctcgcgccggccgcagccgatcgtcgggaacggcttcctcgacacgacggaaccccgcttccgcctgccggtaagacgacgcgcgcggacgtcgacgggctcgccagcttcggcctcgggtacctcgcgaagcccgtgcaccttctcgtgccgagcagcgagtgcaggatacgatgcgccgacgcccgttgccacgtgcgatcaggcccgttccccgcccgttcgttcctgccgatcgacgaagggacgttctcgtcctccccggagctcgccttcgttcagatggcggaagtcctggactgcccccggcttgtcaagctgggggacgagctgtgcggcatctacggcatagaaaccgtcggcatcgtcgacttcgaccgaacgagccctttcaccaccgtcaagcggctagggcggttcctgctcaaggcagagtgcatgcccggcctggtgaaagcccggaaagcagtgcgacacatcgcgccgggttcggcttcgcccatggaaacggccatcgtcctgctgctctgcctgcccccgcggctcggcgggtacggcttgccgcgccccgtaatgaacggaagggcgagcctcaagaagcaagcctgccgcaagccctccgaccgacgctaccgttgcgacctcttgtggccggccgccgacatcgccgtggaatacgacagcttcctgcatcacggcagccgcgcgaagatggccgacgacgcaagaagaaggaacgacctgctggcgcgaggcaccacggtggtatcgatcacgggcagaacagtgtggaacctcatcgaactcgacgagatcgcacggcttcttgcaaggcgcatgggcaagcggctttccacgaacggagtcggctggcgaaaagcccagcacgagcttcacgggatgctgacggggtctttcttcgatgaacgatgagctttccgctcgtataatcggcttcccaacatgcgcagcagggcttcgcgcacgtttccgcgtcgcgatgtgcagcaaaaacgaggttttggcagtcctgaccacaaggaatgcgaaacggagaagtcgcgaccaggggtttcgcctggttgcgttcgctccgacggcgtccaaccgcttccgaaacgtcgaaagactgccaaaacctcgtttttgctgcacatcgatgagatcgaacgtgcgcggaggccgcgaggagcggcgcgcgaagcgagggcggcacgagggtggcgaggcgaggacggcgctgacggtcgggcgcatgcggggatcgcaaagagcaagcgacgcggacgggcgcgaaggtcgcaaggtgcgggcggcgcgatgatcgcgtgacgaaggaagtcgaacgggcactgggaccgcgaggtgcgggcgcgcacggaggtcgcaggatgcgggcgacgcgggcgcacggggcgtgcgagatgccgtcgcgcgcccgggcggttgccgggcgcgcgaggttatggcgcggcgcctcccctacgccccgcgcgggtgcgcgcccccctcgtcgagcgagctcgtctccagaagcgacttgcccttcgtctcgggcgccatgaacgccgacagcacgagacccaggatcacgaggcccgccgcgatcagcatggtggggccgatgccgtaggcggccaggaacagcggcgtgccgtacgtggcgatgatggtgccgatgcgcgaaaacgcgatggcgatgcccaccgccgaggcgcgcacctcggtgggaaacagctcgttggggtacagccattgcaggatgcccggaccgccgctgaagaacgcgtataggccgaatcccaggatgatcacgtagatgggggcgtccgggaacacgcccaggatgacgagacccaccgccatgagggcgagcgagcggatgagcagcggacggcggcccatcgagttcagccagaacatggccgggatggaaccgatcaggaagaacaggctgaccacgctctcgcccaggatggcctcgtggccctcccccagcccgaaggccgtcatgatctcggggccgaacgtgtagatggcgtacatcggcaccacctggcacagcgtcaggatgcccaagaacacgatgcgcttggcgtagccgcccgcgaacaccttgcgcaggctggtcttctcgcccggatcctccagctcgagctccacgccttcgccgaacacgcgccgcatgacggcgtcggcctcctcggtgcggcctttctgagccagccacatgggcgactcggggatgtcgtgccgcccgaccagcaggatgatgcaggggatgacggccgagccgagcatccactgccatccgttgggcacgctgtacaggaagtaccccacgaacgccgccaccgtggcgccgaggtaccaggcggccgacaccatgcccatggagatggagcggtgctgcttgggcgtgaactcggcgatgagcgaggtggctatcgggtagtcggcgcctacgaacacgccgatgaagaagcgcgccgccacgagctggagcgggtcggcgcagaacacgctcaggatggagaaggttccgatggccacgatgtcgacgatgaacatcttcttgcgcccgatgcggtcggtgaggtagccgcccgcgatcgtgcccacgaagatgcccagcaaaaccgacgccccgatggccgcgctccacgcctcgtcgaggttgaacagcggtgtgatctgcgtgagcgccacgccgatgagcgagagcacgtacccgtccaaaaacgagccgccgctcgagaagaacgtgatcttgcgcaagaagggcgtcatggccacgtcgtccatggtcttcttggccgacttcttcaccttgtggaccacgtccccgccgatctgcttggcgccgtcggcgacctcgcccatgggagggctcgttacctgggtcatatgctttacgttgctcatgctctcatctccttctgtgctatgcgttcctcttgcgatacatcctgagcggagcgaaagctcctcttaccgtcaccccgagcgagcgcaagcgagtcgaaggtcccggcggcaccagccgtgacgtttcccgcttgcgccgcacgggatccttcgactccggcctgcgaccggcgctcaggatggcaacctgcggcttactcccactcgcagatgccgaagttcaggtgcggcttggcgccggtctcgtcggcgtcggcatcgaccagctggaagcggatctcgttgtcgcccaccttccacatgcgggtctgcagcgtggtgcccggcagcaccggcgaggtgatgcgggtcttgaaccgcttcatgcgctccggctcgcccgggaagaacgagctgatgatgtggcgcatcgtgaagccgcccaagctcacgccgtgggcgatgggacgagcaagccccgtctgctcggtgtaggcgaagtcgatgtgctgctggtgccagtcgcccatgagacggtagatcagcggcatgttgagcggcatcgtctcctccaccacggcgtcgagcgcgcggtcgggcatctccacgatgtccttcgggggcttggggcctccccaaccgccgtcgtagatgcacacgtcccaggtctcggtctcgcacagaagcgtgccgtcggaggagtaggagcgtccggtctgcttcgagaggcacccgcggccctcgccgcggtcgtacagcgcgtcctgggtgacgaacgtctcgatgcggtcgttcatcttgaagggcgcgtgcagcttgatctcgaagccgtagtgcagcgagccgtcgtagtcgtagccgtagtccagcgtgcgcgtcatctcctcgtgcacggtcagcggcgcgccgaagatgggcagcaccttgagatcggggttcgcggcgtccccctcgttcacgtactcgaggtccgtcttcccgtcgtagcccgcgttgcagcccagcgcgcagatctccaggtccttgaatgtgtactcccttacgaacggcccgaactccttacccacgatctcagtgctgatagccatagtccctctccttatctcccaagtccccaaaaagggtactcattcaccaggttcactcgtacgtgccacggtcgaatcccccgctgcgcttgccgtagggtcgcaaacgaaaagaggcgaggtcgagggcatcgggcggcacccaccaagcgagtttccccttcggggacttgctccgcttcgctccgcggcgccgcagcgcagcgaggactgtctgagcgactgggcgctgcccgatgccctcgaccgtcccgcaggtcatttcaacaatttcttctcgattttcatggagcacgtgcgggggaagctgtcgacgatctccacgtacgaggggaccttgaaccccgccatgtgctcctcgcagtacgcgagcacctcctcctcggtgatccgcgcgcctgcggccggcagcacgaaggccttcacggcctggtcgcggatgggatcgggcacgccgatgaccgcggcctcggcgatgcgcgggtggcctgccagcacgttctccagctcggtggtggagatgttctcccccgcccgcttgatcatgttcaccttgcggtcgacgaagaagaaccagccgtcctcgtccacgtaccccttgtcgccggtcttcagccagccgtcctcggtgaacgtgcgcgccgtggcctcggggtcgttgaagtactccttcatgatggtgcggccgcgcacgcccctcacctggatttcgcctacctcgcccgggtcggcctgcgtgccgtcctcgcgcgtgatgcgcacctcgtagccaagtcccgcgcgtcccacggaaggccaccggcgcgcgccggtgggcgggtcggtgagcacccagccgatggactcggtggagccgtacgtgttcatgagcgacacgccgaagcgctgctcgaacgcctccttctcggcgtcggacaccggcaggaagtagaggatctcgcgcagctcgtggttgcggtcgtcgggcgaggcgggctgcagcatgagcgtgcgcagcatcatggccacgcactgcgtgacggttgccttgaactcgcggatctgcgaccagaagcggctggcgctgtacttctccaccacgatgagcgtggcgcccacggtgagcaccggcatgagcgcggccagctggaagttggaatggcaggcgggcatggtggtgagcaggcggtcgttcttcgtcagcgcgacctcccagtcgccatacaagccgctgaacaggatgttcgcatgcgtgagcaccacgcccttcgggcgcgaggtggtgccggacgtgaagatgatctcggccgggtcgtcggcgctcagcgggcgcacctcgtcgagctcggccgccgcctcggcgcgcagccgcgagaagtcgtgcagggacccgtcgcgctcgagggcggcgcgcgcttcttcgacgccctcgaccttgtcgtcgtgcgtgcgcgccaccagcacgcccttggggcaatacgggccgctgtcgcgcacggcgcggtacaggccgaggaacttcggctcaaccaccgcgcacgaggcctcggtacgctcgagcacgaacgcggcttcctccaccaggtactgctcgttcatgggcaccatgacggcgccgatcttcgccaacccgaacaggcacatcatgaactcggggcacgtgcacagctgcacggccacgcgctcgccagccgcgacccccatcgagaggaacacgttggccgcccggtcgatctcctcgttgaacgcgcgatacgtgtacgtgctggtcgaacccgtgcgatcgcggaagaggaggaactcgcgctcgccgcacgcggccacgaggccgtcccacaggctgcgcaccgtttcgtttcccacgatgtcggtcaatcgtctcaccttttccatccgtcgatcccctggtaatccgcacgatgccgtcgtcgagggccctcgcccgcaagggcggcatcgtgcggatgcgcggcgagttctgccggccgcgcatccgacgtggcgcccgggaagcgattcccggacgcgaggtaccgcgttagccgatcttcacgacgccggccgcggccagctcgtcgatctgctcctgcgtgtagcccagcttcgtcatgacgtcgacggtgtcgccgccctgatgcggcatcggacgccagatctgacccgggttgttcttgaacttcgggaacacgccgaggccgtggaaggtctcgccgtcgaccgtctcccagtcgacccacgtgttgcgcaagcgcaggtgctcttcttccacgaggtcttccatgtcgttgaccacctgcacggcaatgcggtgcgcggcgaagtcctcttcgatgtcgtacttcgagttggccaggcagtactcttcgaacgccttctggatctcgtcggcgtgcgggttggacagccacaggccgctcgtgtcctcggggatgtcctcggtgccccagagatgccccaggccgatggtctcgaggaagtacttgttctggtcgacgccgtacaggcacacgcccaggaagccgtccttgcacttgaactcgccgatgccgcagaggttctggttgcgggcgcccggacgaggccacttgatgccctcgttaaggtagtcgaccaggtagtactggccgatggccagaagcgtctcgtacatggccaaatcgatgctctcgcccttgccggacttctcggccttgtacagggccgccagcgccgaggaggcgatcatcagcgtgttgaagtagtcgcccgcgtagggtccggggagcatgggctgctcctccgtgccgttctgcatgatgatgccggagtaggccatcaccgtcaggtcgtaggcggcgcgcttcaccatcttggggtcgccctcctggccgaagccggagacgtgtacgatgaccatcttggggttgagctcccacagcacgtcgtcggtgatgcccttgcgagcccacgtgccgcccttggaggcctccatgaagatgtcggcgtccttcacgaggtcgaagaacaccttcttgccctcttcggagaagtagttcagggccacggagcgctggttgcggcgctcggcctgcttcacgtacgcggtgtcgcggatagtgtcgcccgcgcccgtgttctcgagccagacgacgtcggcaccccagtcggccatgaggtcggcggccttcgggcaggccagctccactgccgcgtacacgaccttgacgccgtcgagcgggccgtacgagggcttttcggtaggaattgccatagttgaatcctccttgaatggtgacggcttgccgtggcggccggctagcggttcagaacccgaagtcattcggacacggccgataggccgcttacctcattgacctcggaaccttcaccgctatccgactcgccacgacagccctgtccaatactgactaaacggagctcctgcttacttctgcttgtacttgatggaggcgcccttggaggtggcgaggatcatcatctcgtcggtgccgccggagacgcggtcgacgcgcaggtcgcgccagatgcggttgatgcgatgctcagaagccacggcgatgccgcccatgatctgcatggcgtcatcggtcacttcgaaggaggcgttggcgcagtagtacttgcacatggcggcagcggccgggtcgaagttgccgtcgttgttgtcggcgttccaggcggcctcatacagcatgttcttcatgttcgtcagcttgatgcacatatcggtgatcttgatctggttgagctggaagcggctgatgggcttcccgaaggcgatgcggctgttcgcgtgcgccatagcatcctcgaaggcgcagatggcggtgccgtagtcgcaggcgcccacgagccagcgctcgaagttgaagtcggacacgccgcgcatgaagccgttgccctctttgccgaagatgtccttctcctcaagctccacgttgtccatgtagacctcgcagcagctgtccatgcgcaggcccagcttggtcagcggggacagcttcacgcccggcttggacatatcgaggaagaactcggtgaacatggtcgggtcgtcggcgttcttcgccatgatgacgaggtacttcacaccggccgaggaggtgatgaaggtcttggtgccgttgaggtagatcttgccgttctcgcgcttgtaggtggtggccagcgcgcccacgtcggaaccggcgcccggctcggtgcaggccgagttccagatctgctcgccggagcccagcgtgctcatgacggcctcgatctgctcttcggtgccctcgcggatgatggtctcgaagccgggcagctggtacagcacgtaggtgggggcgccgtacttgcccaggatctcgtacacggccatcagcgtcacgcagggctgctccaggcccaggccgccgtggctctcggggagcatgatctggtcgaagcccagctcgcagaggcccttcacccagcgcagcgggtactcgtgcttctcgtcgcactcgtggaagtaagtctcccaattctcgctctccatgtactcgcggtagctatcgacgataagctcctgctcgtccgtcaacttgaaatccatgacgatcctccttttagtgtttgtgcaacggggctgatcccccgctgtagccttgattggtcttccggccgcggcgcctacagccccagctgctcgcggtagaaggtcgcgccgtgctcgagggcgtcgtttgccgcatcgagcatcttggtgtagtgcagaaacgcgtggatgacgccttcgaacacctcgtagcggacgggcgtgccgtactgctcgcagatggctgccagcgtggcgctgtcgtcgcgcagcgggtcgtactcggccgccgcgatgtagcaggccggcatgtcgcgctccaggtcgttcaggaacaggttcgcgtaggggctggccgccagctcggcggggtcgttcgcgtacatctgcatgtagaactgccagtcggcctcggtaagcccgtcccacggaccgcccagaaggcgcatcgaagacgagtcggtcaggccgaaccagccgtagtacagaaggcagcacttcacgaagtcgcttgcgcctttctcctcgcgcaggtacatcgtggccgcaaggcccagatgcgcgccgccggagtctccggcgaaggacaggcgctcgccgtcgatgccgtgacgggcgccctgctcgtgcaggtaggaggccacggcggccacctcctccaccgcgctggggaacttggcctcgggcgacagacggtagtcgacggccaccaccggcacgccggcatggcttgccaggacgcggcacacgcggtcgtgcgtgtcgaggttgcccagcacgaacccgccgccgtgcacgtacacgatggccggcatggcgggcttccctgccgcacggccagcagcggctgcagccgtgggatagtagtagcgcaccggaatggcgccgtaggggccgtccacctcggcatcgagcttctcggccatgaccggtccgccctcgcaccagaacgcgcggccggccacgtagttctcgcgcattttctcgaagcccacgctggtatcgttcgcgtcgcccgccagctcgtcctctttggcgagcacggccttcatctgcgggttgatcttcgagagcacgtcgagcttgttcattgcaaccttctttcgcgaaccgatcgatgcgggatggtggatccggtggaacaacgggatcgagacgcggggacgctgcttgcagcggcgcgcccccgcgctcgctggcggcgcgttacgccttggcggactcgccgtcctctgcggccgcgaccgcgtcggaggcgccgaagtgcttcttgatggagcggagcagcatgaccagcgcgatgcagccgatgacgccgaacatgatctcgaagccgaagatgctggagaacgctgccgtaccctgggcgtcgatcatgccgccgtaccaggtgtggatgaacacgtcaggcaggaagccgatgacggacagcaggccggaggcggtgccgaagatggccatggggatcttgacctcggacagcggcgaggagccgatggagaaggcgccgtaggtggtgaagccgaacacgaccacgaggatggaggcgaccatggcgccggagggatcctgcgggaacaggatgaagccgacgagtaccgcgatggacaggatgaagccgcccaggatggtcttcgaggggctcttgatcttcgtggcgatgaagccgacaatggggccggcgatgaggccgatgccgtaggtgcggatgaggccgacgatgttcacgaggttgccgtcggcgttgaagcactgcgtgaggtacggcgtggtgtaggtagcgccctggtacacggcgtagcaggcgaagtacgcgacgcaggcccagatgacgccggggtgcttgatggcctggatggcctccttgacgctgaacagcttggcgtccttgttgatctcgcccttgaagtcggggatgatgaagaaggagacgacgcccaggacggcgatgacgacgcccaggaagatgagcatggcctgcacgcccgcggagccggagatggccgcgatgatgccggcgttgatgaggccgatgacgaggccggtgacgccgtagatggagtagctgatgccgatcttggaggcgtactcgttctcctcgcagcacaggcggatgaccttgaagcgcgtgccccaccacacgaggatggaggtaacgcccatgagcacgaacaggatcaggcagatctgcacggaaggcagcatggcgtacacgaacacgagcacggcggtggcgatgaagccgacccatgccagcgtgcgcatgcggaacttgtcggccacgatgccggagggcaggtagcagatcatggcggcgatgccgtaggccgacaccatgaggccgaggtcggcgttggtggcgccgagcgcctgcatcagtggatcgtagaagacgttcttcagatacatcggcgcgtagatgatcgacgagcccatggagatgagcacgacgagcgcccacttgtgcagggtggagagctccttgtaggtaacctctcccttgctcttggcaagcaatgacatccttacttcctttctccttgtctgcgcccggtctctcagtcggtcgccggcacgttcatggcggcgaccggcggcgaaccgagccgttgggtgcattctgttcgcagactgtggttttgccatcgcaaaatccccactaattggcctaatacttactttcttgcgaggcgttaccgaagaattagtgatagattctcgccgtgatgaataaggcggaggcattgggagccaccctgcgaaagggcagctcaacggcatcatcatccatcgctaacgggagataggaagggtggtcggctttatgacgctccaatcggcagcaccgtcggaccggaaaacgggaaaagaggggtacttgacggatcttgcgactcgtcctgcgctgaaatacgtgggattcgcgttgcttttagcatggcactacgctctatggttcgtcccgcacatgttcacgcagaccgaactgctggacgagcgcgtcaccatctcctggctggtgaacttgggcgccaccgtggtctcgctgctgctcatcgcgttcatgctggggcgcaaacgtcacctttcggcctaccgttggctctacgtggccgcgccggcgctcacctgccttgcaacgttggcgatatgcctgattcctcaagtgttcacggtgcccggcctcgcctacgcgctgtccttctttctcggcatcaccgaatcggtcatgtggatcctctggggcgagcgctacgcctgcgtgaaggcgaacttcaccctccgccacatcggcacaacgttcggcctgacgctgctcggaaccatcatcctggcgtgggtgctgccctcgtacgtgacgacggcgttcgtctcactgctgcccatcgcctccggcatgctgctggtggccgctcgccgcgacggctcgcgggcgtttccggtgctgttgccgaagagcgcggcccagggcggtctcaagaacatggtcgcagtgagcatcatcaccttcctggccagcgtcgcgtgctacttcctcgtggccatcatcccctgggaggtgctgcccaccggagacgtcagcttcacgttgggcatcctcggaggggcggccatcatgctgggcatcgccggcatcagcatcgcgtcgaaggacaaggccagcatattcaagatgttcccctggctgctggtgctgctgatcgcggcgttcgcgctgttcctggccgacgaggtggcgttcttccccgccttcatcatggcgaccggcatctcgtcgctgctggaaatcctgctcatcatgtacttcggcatcctcacctcgaaaggctacgtgacgccggccgtagcgttcgccttctccggcgcgttcgtgcgcgcgggcatcgccgtaggcaatacgtgggccgtaggctacgagcacgcccccgagctggccttcgccatcacgcccgagacgtgcctggggctcatgtgcgtgctggccgtgctgctggtgccgctggtgcgccaggagttcaacatcgtggcactgacggccgcgccgcccacgaaggccgagatcgacgagatctgctccgaggtggccaaggagttcagcctgtcggggcgcgaggccgagatcctcgtgctcatcgcgcgcggctacaccacgaacaacatggccgagaagctggtgatatcgccgtacaccgtgaacacccacgtgcggcacatctacgagaagatgcagatccacaagcgcagcgagctgctgaactacctcaacatgcagcgaagcgatttctagaaggctctgcatgcagaagcgccccgatcggggcgcttcgcgttcgtcatgctctcccgcctgcttctaggtgcaggggatctttacttcgccgggtagaagccgctcggctcttcgcccaggttgatcatgatgttcttcgtctgggtgtagtgctcgagcataatcttgtgcgtctcgcggccgatgccggactccttatagcctccgaacggcgctccggacgggatctggttgtaggtgttcacccacatgcgcccggtcttgacgccctgcgcgacgcggaaggcgcggttgatgtcgcgcgtccagacggcgccgcccaggccgtacacggaatcgttggccaggtcgatgacctcttgctcgtctttgaacttgatgaccacggccaccggcccgaaaatctcttcctgggccacgcggcaggagttgttcggcacctcgatgagcgtcggcttcaagaaggcgcccttggcaagctcgccttcggtcgcgcgctccccgccgcagaggacgcgaccgccctcctgcttggcgatctccacgtactcgaggatcttgttcatctgattctggtcgatctggctgcccatctgggtgtcgtcctcccaaggcatgcccaccttcaccttgctgaacgcctcgcatgcgtcctcgacgaacttgtcgtagatatcctcgtgcacgaagatgcggctgccggcgcagcacacctgaccctggttgaacaggatgcccagctggatgccgtcgagcatcatgtcccacttggcatcggggaagatgatgttcgccgacttgccgcccagctccaacgtggccgggatgaggcgctcggccgccgcgcgggccacgtcgcgaccgacttcggtcgacccggtgaaggcaagcttgctgatcttgggattgtcgaggatgtactgacccgacttcgagccgcggcccgtgaccacgttgaatacgccggccggaatgacgccttcggtgagcttggcaagctcgagcaccgtgagcgaggtcgtggacgagggcttgaacaccgtgcagtcgccggcggccagcacgggagccagcttccaagcggccatgaggaacgggaagttccacggcacgatctggccgacgacgccgataggctcgtgcagcacgagcgacatcatgttgcccggaagcaggtcggcctctcccgtgtcggccagcagcacgccggcgaagtagtggaaatggtcgaccgagtacgccacgtcgatggcgcgcgtctcgcggataggcttgccgttgtccagcgattcgagcagcgcgaacctctcggcgttctcctcgatgaggtcggccaccttgttcaggatgatggcgcgctcggccttcgacgtcttgctccaggtttcgaacgccttccatgcggcgtcgaccgcgcggtcgacgtcttccttcgtggcgtcggcgatggtggaaagctgctcgccgttggccgggcagtacacgtcgagcgtgccgccgtcggacgcgtcgacccacttgccgtcgatgtagagctggtatgatttctgagcagggttgttcatgagtgctcctttcagataaggtcgcatgccgcttccccgccgccgcgtccgcaccgtctctcaacgcgcgatccgcggatccggcgggcagcccgcatgcccgctgagcgacctcaaggccgttgcggccaagatacaccctcgcatgcgatgcggcggcctccgttaccaactgttaacacgagcggtactatttcctcgattgatgcacgatacgtaacaattagggaacggcgggcgttcgcgaacggttcttttcggtcgcgaacggccgagcacgagaacggcctcggcgcgatgccgaggccgttcttcgtcaaggggaaagcgggaagcgatatccggaagcgccctagagggccgtgccggcgatccaatcgccgtactccacgtggccgtcgtgcttgtccacgccgcgcgcgatggtgatgcgctgcacggtgggagcgccctcttccaaccacatggcgcggcagtcgcggtacaggcgctcggtcgggccgtacggcgaatcctcgaagtagccgtcgccgccgaagatctccagcatctcgtcggacaccatcttcaccgtgtcgatggagaacagcttgcacatggcggccttctcgtcgacgaactcgttgtgcggatccttgtcgtagtcgtcggcgaagtccatgaccatgcagcgcagtgcgtggatgttcgtggccatgttcgccagcttcatcttgatggcctggcgctggatgatcggcttgccgaaggtgacgcggtcgcgagcgcgggcgatggacatctccagcatgcgctgggccatgccgaggttcgagtcggcgatgtgcacgcgggagatggcgagcgagtgcatggccacttccatgccctggccctcctcgcccagcaggtacttcgggtcgagcacgacgtcggtcatcttgaagccggcgtggcccgcgccgcggcagcccatcatgtgcggcatgggaaccagttcgaatcccggcgtgtccatgggcacgaagaaggcggacaggcgctcgtcgccctgcttctcagggtcggtcaccgcgatgacgtaggcgtactgcgagcagtcggtgtgggagatgagccacttctcgccgttgagcacgtagttgccgttctcgtccttgagcgcggtggtatgcagatcggcgccggtgccgcccgtctgctcggtcagcgcgaagttcgtgaagatggtcttgtcctggaacttgtccatgaactcggccttgagctccggcttgccgtagtcgtcgaggatgcgccagttcaggtcggcggcgtagtgcaggtgcatgcgcatgccgcccggtccgcgggagaactcctcctgcacctgcaggatctccttctcggacaggccccatccaccgtactcctcgggcagcgcgtagcggtacaggttgttctcgatggccaggtcgtagaattcctgcgggaacttgttggtgacctccacctccttctgcatctcctcgaacggaccctcggcgagcgcacgcaccgtcttgaggtactcgcggaactcctctggggtaagcttgctcatacatcctccttcaacgtcttgccagactgtcggtttcgcgctgcttccccgtcgtgtcggcgagtggcaaccgcgttggcctcagtttgcaccctaaacgaatattttgtccaataggtaatcgatgatgattcatttgccaaaggataggttttggctatggttccccttctgccgtcgattccccctggatcaactgtttcttcatcctgctgcaatattgcatattttaccagttcatacaccctctatgccaccagcataccaacggctttgtccggttgcatggcgctatcgataggaggaacctatgaatcggccgtcgattcactgaaaagaacctattggacaccaacgcgaatatgggtgcaaactgtacgaagcgacagctcgaacgaaacgggcgcggcaccccctctcccgtttcgcggggacacggacggacggggtcgtgcgcgcaggacgagcgctgcggacgatctgcacagagaaggagcgttgactatggatttcagcctgaccgtcgatcaggaactgctgatcgagagcatccaggaattcgccgagaggtacttcgacgaggacaccgtgaacgccatgtacgagaaccacggcatccccgacgagatcggcgaggcgtaccgcgacgccgggttcgccttcatgggcctgcccgaggaatgcggcggcatcccgtgcgacaagctcacgctgggcctcatgaccgaaacgctgtaccaccgcaccggctgcatgacgccgttcatgaccgccatgctggccacggccgacgtcgccgagttcggcacgcccgagcaggtgtcgctggtcgtcgaccagtacaacaagtcgggcaagcccatcgcatcgctcgcgctttccgagccgggcgcgggctccgacaacaaggccatgagcacctacacgaagcgccaagacgacggcacctacatcatgaacggccagaagacctgggtcacgaacggcggcaacacgccctacatgctggtggtgtccaaggacgagcacccggcgcacgccaacgagagcatgtcgctgtggctcatccccaccgacgcgcccggcctgtccaccgccccgctcgacaagatcggccagcagatcatcccgttcgtcgacgtgttcttcgacgaggtcaggctcaccgaggacatgcgcctgggcaaggagggcgagggctttctgctgctcatgaagaacttcgagatcgagcgctgcctcgtggcggcccagtccctgggccttgcgcaggcctgcatggacgacgcggcggcctacgccaacgagcgctacgccttcggcaagcccatcgggtggaaccccatgatccaggacatgcttgccgagatggaaaccatcctggagaactcgcgcaacatgctgtacaagacgctgtggcagctggatcagggagaatcggtgcgcaccgaggcggccctgctcaagcgctacgccacggtgggctgcacgaaagtggccgacatggcgctggagatattcgcggcgctgggctacaccacggcctcccgcgtcggccgcatctggaccgacctgcgcggcaaccagctggccggcggcaccgtggagatcatgagctacatcgccggacgacagatcctcaagcgctacgcgaagtgacgcgccgcgcagacacgaagcaagcacccatcgaacgaaaggaatccgcatgaacattgccgtagcagtgaaagtggtgcccgacgaccaggacatcgccgtcgcggccgaccgcaccctcgactactccaaggcccaccaggtggtgagcgagtacgacctcaacgccatcgaggcggccgccctgctggccgaggatgccggcgccaccctgtacgccgtcagcgccagcaacgcgaaggccgacgacctcaaggtgaagaagagcatcctgtcgcgcggccccgccgagctgtgcatgatcgccgacgacgcgttcgccttcgccgacgcccgcgtgacggcgcgcgccctggcgacgctcgtccggggcatcggcgaggtcgatctcgtggtgtgcggcgacggctcggccgacatgtacgccggccaggtggacgtgcagctggccgccgagctgggcatgccggtggtcaacgccgtcacctccatcaagctggaagacggcgtcgcagtggtggagcgcacgcttcccgacgtcgtggaggagatcgaggtgccgctgcccgccgtggtggccgtcacgcccgaatgcgcctacccgcgcatcgccggcatgcgcgagatcctcacggcgggcaagaagccggcgacggtgacctcggccgccgacgccggcgtggacgtgagcgctgcggtggagatcgccagcgtcacggcccccgagcaggccgcgcgcaagcgccaggtgttcgacatgaaaaacgacggcgacttcgacgcgttcgcgtcggcggttgccgcagccgtccgcgcgtagccgcagtacgaaagagaggcatgcatcatgaaagcattcgtcatagctgaaaccgccgacgcccagaaggagctgtgcgccggggcgcgcacgctcgccgatgaggtcctgctcgtctccatcggcagcgcgccccgcacgggcgtggccgacaaggcctacgccgtggagctgccgcaaggcgagctggtggagaacgcctacgacgccgtggccgccctgtacgacgaggtcgctccgaacacggtgctgttcgagcccaccccgcgcctcaagatcgtgggcggccgcctggccgcgcatgcggacgcgagtgtgatgtgcgacgtcaccgcgctcgacggagccgaggccgagagcctctacttcggcggcctcgcgacgaagaggcagcgcgccgtcgggcccgtggccttctactcctgcagcggcaccgccttcgacggcatcgaggcctcgggcaccgacgtcgtggaagagcgcgcgttcgtcgccccgcaaaaacccctcaagctacgcggcacgcatgaagtttcgcacgcgggcaccgacctgagccgcgcgtccgtcatcgtgggggccggccgcggtttcgcccacgaggaggacttggagctggcgcgcagcctggcctcggccgtccacggcgagctggcctgctcgcgcccgctcgcggagaacgagaagtggctgcccaagaacacctacctgggcgtttcgggccgcatggtgtcgccgaaggtgtacttcgccgtcggcatctcgggccagatgcagcatatgataggcgtgcacaacgccgatgtcgtcgtagccgtgaacaaggatcaaaacgcgccggtgttcgcccaggcagactacggcctcgtggccgatctgcacgaagcgctgccggccctcgtcgagaagctctcctaagcgacccgaccgactgaaaggctgattccatgtccgatgatcagttcgacgcgatcgtcgtcggcgccggatgcgccggcgcggtcgcagcctaccggctggcctccgcgggccgttccgttctcgtagtggaacgcggcaactacgccggcgccaagaacatgaccggcgggcgcatctacacgcatgcgctcgcccgcgtgttccccgacttcgagggaagcgctcccctgcaacggcgcatcacgcacgagaagatatcgatggccgcccccgatgccctgttcaccatggacttcacggccgacgagctgcgcgagtcgggcaaggactcctacgcggtgctgcgcggacccttcgaccagtggctggccgagcgggccgaggaggcgggagccgacttcatctacggcatcgccgtggaggacctcatcgtgcgcgacgggcgggtatgcggcgtcgtcgcaggcggcgacgaggtggaagcgcgcatcaccgtcttggcagacggagcgaactccctgctcgcccagaaggcgggactcgccgacgacgtcccccttccctgccagatggccgtgggcgcgaaggagaccatcgcgcttccgccgtcggtcatcgaagaccggttcctgtgcgcgccgggcgaaggcgcagcatggatgttcgccggcgactgcacgaaagggcgcgtgggaggcgggttcctgtacacgaacgacgactcgatctcgctcggcctcgtggcaacgctgtcggatctggccgcgggcgacgtgcccatctaccagatgctggaggacttcaagcagcgcgccgacatcgccccgctggtcaagggcggcgagctggtggagtactccgggcacctcgtgcccgaaggcggcctcgccatggttccgcgcctgtacggcgacggcgtgctggtgtgcggcgacgcggccatgctgtgcatgaacctggggtactcggtgcgcggcatggacttcgccgtcagctcgggcgacctcgcggccgacgccgtcatgcgcgcgctcgaggccgacgacgtgtcggccgcgcagctggccgcctacgagcagctgctcgacggctgctacgtcctgcaggacctcaagcgcttccgccgcttcccgcgctatatggaagagacgacgcgcatcttcaacgagtacccggccatggcccgcgacatcatgctcaacctgttcaaggtggacgggcatcctcaggcgcgcatcaaagacaaacttctgggcccgctcaagcgcgtggggctgtggcgggtggcgcaggacggcaggaaggggatgaaggccttatgaacgatccggtcatcagcgtgaacgtggacgccaagctggcgctcaacaagtacaacgtggacgaggggcacgcgcacatcgcgctttcggacgatgcggaccgcgcggagttccgcaagctcgtgctggcctgccccgccgcgctgtacaagatcgacgaggacggcggcctgtcgttcgactatgccggctgcctcgagtgcggcacctgccgcatcctgtgcagcagaaccatcgtcgagcgatgggagtacccccagcccaccatgggcgtggaatatcggtacgggtgaagacgccccctgtcgccatgccggccagcacgcggggcggcatggcggggcaataccctcacatcctcctttttgtgtaacggcgcgcgcttcattcccccgtataatagaagcggtgttcgacgcggcgcacgatcccagggggctaccgatgaacctttcgcagctgtactacttccgcaagctcgcagagctgcagcattacgccaaggcagcgaaagagctctacatcacgcagccttccctgtcgaacgccatcagctcgctcgaacaggagctgggcgtgtcgctgttccagaagacgggacgcaacatccatctcacgaagtacggcgccgagttcctcgcctacgtgaacaagggcctcgagcagatagacaagggcatcgccatcatgaagaactacgccggcacgggcgacggcggcaagatcgacctcggctgcatcatcaccgtgcagaccgacttcatccccaagctgctcaacggctacaaggccgctgccggaggcgtcgcgttcaacgtgcgcgaggacacctcgatacccctcgtgaaggatctgctgagcggctgctacgacgtggtgttctgcgccaagggcaacgaggatcccgacctcgcctacgtgcccgtgctcacgcagaaggtggtcgtggccatgagctccgattgcccgctggtggagaaagagttcgtcaccccgaccgacctgctggagcagcacctcatcacgtacgtcgacaccatcccgctgggacgcgccgtcaggcgtatgctcgacgagtgcggcatcaagaacgtggagtacagctacctcgacgagtccatcctggccggattcgcggccaacggcgtggaggcggccgtcatgctggacaccttcctgctgcgcagcgtggacgacgtggtggtgaggcccttctacccgagcgccctcgatcggcgcagctgccaccaccgcgtgtacatggcctacagcacgaagaactaccacccgtaccgcgtcgaccacttcatccagcacgtcatcgagacgaaggcgctcaagcccgatccgaacgcctgctacatcgactgatcccgacccctttggaggattgccatggcagccgcagaccccgccgccttaagccccacgcgcacgcgcgccacctggaagcccggcgtgtcagacgagccgctgcccttctacggctgcgacggatgctcggcggcgttcatcggcatcgacggcggcgagggcccgcggctctcgggcggcgggaggcggcccaccatcgagctgccctacgcaccggcgcccgatcctgccgcttgcggcggtttcctcgagcgcctcccggcggccagcgctgcggactgcgccgattcgatcgaactttcctacgacgtggtgggaggcttcgacgcgaacgcgctcagggtgttctggaaggtgcgcgaagccggctgcgaaccgcgctggttcgcgctcaaggcgttcacgggaatgcagctgaagtacgtgctgccaggcaagcgggcgcctatcgtgttcgcgctgggcgacgaggacgcttacgcctactgcgacgaggatccctgcgtcggctgcacgttccgctgcaagcgcggcttcgagctgtacgcctacgtcgaaaagatcgggctcgtcgcgcagagcgtgcaccgcgaggccgtcacgcgctaagcgacaccccctccgcccgatcaggccggaaacccaggtcgatcccagcgccttcggcgtcgaatcccttcacgaagtcgatgaacgactgcacggccgcggtcttggcgtgcttcgcgttgacggccaggtacacccagtagaagtcggggcgcacgccctcgagcggcaccgtcgttatgttcgagaacaccttgaggccgatggagttcagcatgagcgcggccaagccgccgtccaccgacagggcggacgccatggtgatgtcgtcgtcgtagagcgcctcgacgccctcgagcgggctctgctccaagatgcgctgcaccgcctccccgatgggagtgccccgccggtacgtgatcaggcgctggccgcacagctcttccagcgcgatcgaagagcggcccgccagcggatggtccgcgcgcacgcccagctccaaactgcggttcagcacggggaagtactcgatgtcgggctcgcggtcgcgccgtccgcagaaggcgacgtcgagcgtctcgttgtgcaggctctgcgtgaggtagttcgtgaacgcctggtacgtctcgatgcgaacctcgtcgccgacgtgctcgcgataggctttgagcagcgtgggcaggtagtcgtcctgcacggtgaacgtagcgcccaggctcacggtgccgcccagctgcgtttttcggcggttcatcgcgtcgatgccgtcgtcgagggagcgcaggctgtcgctcacgtagcggtagaactcgctgccgttcgacgtcagcttgacgctgcgcccatcgcggcagaacagcgcgacgcccagctccttctccagcgagctgatcgcgtcggagagcgtcggctgggcgatgtagagctctttcgccgcgcgcgtgtagtgctgcagctcggcgagcttcttgaagtagtagagctgggacaggttcatagcgatgctcccccgcgatcccgaccggttgaagaagacgctcgtcgggggctcgccgcagcgagcccccgatcaagccgaagagctgttctagcagagtatagagcctattcggtccactggctcttgaacttcttggcgttcgcgaacgtgtagaagccgagcagaaggatgaggaccagcagcaccaagccgacgatgaacacggcgttgaagccgaagctggaaccgatccaagcccagatcatcgatgcgaaagcggcgatcaggttgaacacggtgctcacgcgggagtagatcacggagtagtcgcgcgaaccgaacgactggcgcacgatgaccggcaccagcacgacggccgtggcgtagaacgcgccgaagatgaatgcgccgctgtacaggatgtactcggaagcaatgccgaaccagcagagcagcacgccggcgacgccgcagacgaacgcgaacaccaaagcgcccttggcgttgcggtcggcgaccacgcccaggatgagcttgaacagcgcctggcccaccatcatgaccgtggtcatgacgccgccgaccaccagcacgtcgaacgcgacgtcggtgagggacttcgtgtaggtggggaactgcatggcgatgaggacggcgatgttgatgaggcccgcgaacacgcacacggagtagaacgccggggtcttcatggcggccgcagcggacaggccggtgggcttggccggagcctggccggcaaccacggaggcgccgtacggggccagaccacagtcctcgggcttgctgcgcacgcagaacagcgtgaacggcagcgaggtgaccaaggcgatgacggcccagatcaggtagatggtgtggaaatccatgccgccggcgcgcaggcccgtgaacacggcggaccacacggcgccgccgatgccggtgaacgccatgcacagaccgatgaacgtgcccgccttgtcggcgaaccagcggttgatcagcgtggggatggccagccacaggatggagatctcgcccaggcccagcagcacggcggccaggtagaacatccagatctcgttcgaaacgctcatgagcaggaacgcgccgcccaccaagcaggccgaaacggacaggatgatgcggatgtccacggtctgcagcagcttgcccatgaacggcgaggcgacggtcatcgtcaggtacatcaccgtgacgtacatggcgaacgccgtggtctcgacgcccaggccctcggcgacgaccggctggaacaggccccacgtggaaaagcacagggccgagcacccgaaggtgatcatgatgcccgtgagaacgacgagcatatggcgcacgctcatcttctctttcttagctacggtactcaatttgtcctcctaatttttccgtcgtcccccttcgtggaattgagcgcgcacgaaagggaacggcacccctgacacggtctgcttagagcaggctctctagcagtcattattccgcgctgcttggcatgcgagaatggtcataaaaccggaactgacccgtaaacaggtgacgcaatggataatatcggacaattgagtaatagttttgagcagatgcgcaggactatctggcaggcctgtcacccaaaccacgaaaaaagagggatgcctgccgacgtatgcggcaggcatccctgcaaacctcgcttgcgcgttcggcgaggcggcgtcagtacttctccatgatgagcggcgaggcgatgtacaccatgatctggtcggtgccctccgcgatctggttgccgcggcaatcctgccacagctggctcacccgcgcgccctccgtgtatcccatgccgccgagtatctgcatggcgctcgatgccacctcggtggcggcgtcgggcacgtagcgcttcatgagcgccaccgacaggcgctcgtcggggccgccgttgtccaccgccaacgcagcccggtacagcatggagctcatattgtagatgctcacttccatgtcggtgagcatctgctcgatctgctggaagcggccgatctgcacgccgaacgccttgcggctgcgcgcgtgcgccacggcgtcctccatggctgcgcgcgccatgcccagcgacgacgcgcaggtgaacacgcggccgaattccagcaggcggaacagctggcggaagccttcctgacgtccgttcaggcgataggccggcgacagctccacgttgtcgaacacgagcgtggcgaacggcagcatcgactggccgatcttgttgatggggtacgcgctcacacccttgaggtcgcgcggcagcagccagaacgtcatgggcgggtacttccccggcgcctcgcagtcgcggtcgatggccgccaccatgatataaggggcgtactcgccgttgttcacgtaggtcttgcgcccgttcaggatgaggtgctcgtccaccgtgcgcgtgtacgtctgcatgttcatggcgtccgagcccgcctccggctccgagatggccagcgcgaacagcagccggcccgtctcgcggtagtccttcagcacgtcggcgaactcgccttcgtcggcgaactgccgcacgatggagaggttgaacaggtcgttctgaaacggcagcgtggcgccggcgcacctcgacagctcctcgatgatgagcgcctgcgagcacaggctgaacgtgccgtcaccgtcctccagctcttcgagcccgaagtacagatccacgaaccccttcgccacctcgtcgggaagaccctggtcgcgacgccattggtgcacgtgctcgggggtgaacgtctcctcgccgaaggcgcggaacgcttgcacgagcttgcgctgcttgtcagtcaattcgaaatccacgtggtgccttctttcctccgaaacgccccagcgcccgcgtgcgttcccgcagaccctgcagcgctgcaatcagggattacttgttaccagtatactgagacagccctaccgcatcacccccaaatcggccgaattaaccaaaagcatggacggaaccgtcgatttgcacccacactgcccggcatatggccaacaaatcggtgaacctgtgagtgaaaccctctgggcatgacaaaaatagtgagcgaccatcaagtataaataattgtccatggtaacaaatattagagtatgtgagtataacgacaggagaaaaccacccaccataaaggaaaggagaaccgtcgtatgaccgtcactgagaaactcaatggctacggcccgcttgcgggcatcaaagtggtcgagatgtgcacgtacgtcgcagctcccgcaaccgtcagagtattgtccgaaatgggcgccgaagttctgaagatcgaatcgttcgacggcgatatccagcgcacgcaaggtccgggcttcggctgcgatctgaccgacaccgaggatccgaccatcgacctcaacaacaccaacaagaactggatctccctcaacttgaaatccgaggaaggtctggccatcgcgaagaagatgatcggcgaagcagacatcttcatgaacaacatgcgcacggccgccctggagaagctgggcctcgactaccccacgctgtccgccgagttccccggtcttatctgggctcagatgcgcggctacggcgagttcggcgagttcgcacactcccccggctacgacgctgtgtgctgggctgcccgcggcggcgtcgcgggtaccttctgcgagaagggcacgtcgccggccattcctccccaagcgttcggcgattacaacaccgcgaccatgatggccgccggcatcttgggggcgctggtgaacaagctgcgcacgggcaggggcgacaaagtcgtcgtcaacctgtaccactccgccatctggggcggcagcatcgccgtgtgcgcgcagcagttcggcgccgactacccgaagacgcgcaaggacgtgccgaacccgttcaacaacacgtacaaaaccgcggacgacaagtggatctacatctgccagccgcagcataaccgctattacaacgacatgatgaagatcatcggccgcgacgacctggtcgacgatccgcgctacgccacggttgagaacctcaaggaaaagcacctgcagccggagctcatcgagatcctcgaaggcggattcgtccagaaaacgctcgacgagtggctgcccatcctggccgaatggcaggtgcccagccagaaggtcttccgttacaccgacatcgtcaaggacgaggaggcgtacgtcaacgacgctatccgcaaggtgaactaccaggccttcggcgagcgcgcgctgcccaccaccccgatccgctacgcgaacttcggcgatcccccggtggtgctgtccaagcccatcggctaccacaccgccgagtacctgcacaagtacggctacaccgatgagcagatcgccgagatggaagccgccggtgccgtcaagtgctatcacggcgaggaagtgccggacgtcatcttcaagtccgagcgccagctcgccggcgaggctccctgcaactggtagacctccgaccgccaaaagaaccgcagcggattgctgcggttctttttttgcgccgggccccgtcgcccgctttggctgaagcgcctgcggctaccccaggcgcttcagcagctcgaccatgtcctcgcccagctggcgggcgtaggcgaacgccgtcgcgtcgtcctggacgcggcgccagcggatgcggccctcctcgtccaaaccggcgaactgggacgcagccgtgccgtttgccttcacgggccccttcggacgcggatgaacgaccagcatctcatgagtggcgaagaagcggtccagcacgccgagcgtctcctcggcaccgcagtcgacgagccccgacgtggtcactgccccgcccgccttgcccttgagcgcgttggcgaccatatgcagcgggcgcgtgcggtcgatgaacgtcttggtgcgtgccgacacgttcgcaaagtagtccggcgagcccacgataatgccgtcggccgccttcatcttcgccacgaggccgtccatgtcgtccgacagcgtgcaggccggcttcgccaagcaggcgttgcacccgatgcagtagccgatgtccagccgggcgagctccacgaactcggtctcggcccccgctccctgcgccgcgtcgagcgccgcttgcagcagggcggccgtccccttgcccggccggtggcttccgttgatggccagaatgcgcatgttctcgtcctctctctaaatgcgaagcgcccccgacccgcagagcggtccgggggcgccaaaacgcgggcgcgtgcgcgcgccgtgcgccttacaggttgtggaactggtacttctccgggttgtccttcacgtcctgcttgttcttcgggttcatcttgccgacgcccatctgaccgtcgttcgtgttggaggccagaacctggttgcggttctccatcttgacgacgttctcgaagctggtgccgtcgagggaggcctgcaggcactccttcgtgaggcgcagaccgaacggggcggtggcgtcgcacatctgctgagcgaatgccacggcctcttcgaccacgtcgtcgtcggcgacaaccttgttggcgaagccccactccagcagcttctcggcaccgaagcggttggggttcatgaggatctcgcaggcgcgggcgtagccgacgatcttcggcaggaagaacgcgccgcccatgtcggtgccggtgtagccgatggacaggtagccggcgttcatcttgaacgactcgcccagcacgcgcatgtcgcacgcgcaggagatggacaggccgccgcccacggcgtagcccttgagggcgccgatgatgggctgctcgcaacggcgcatgttgatgatctggtcggagcacatgcgctgcatgatgtagaagtcgcgctggatgcggcccatgtcctcgggcggatcgagcgccaggtcgttcaggttgaagccggcgcagaaggacttgccctcgcccgtcagcacgatgacgcggcaatccttgtccatgcgcaccttgatgaggaagtcgttgaactcggccatctgggcgtacgacatggcgttgaggttcgcggcatcgttgaagctgcacacgtacaccgggccgcgacggtcgatgatgagcttctcatagtcgtactcgaactccggcagatggtaatcctcttgatacacgctcattggcactacccctttccctgtggtttcatatcattcgcttcttaggcgccgcgtcggggacgagcgctcggcgaggccgtgttcacgacccttctttatgatcgccccaacaacgcgattaatctacggacaatagactgatactgtctaagatatgaaatgctcagccaacatatccttaattttgtcctattaattgcagaaaacgggaacgagaacctttgagactcatgttccgatcaaaaagataacctcatccagtcctgcgctgtccataatgaaatatattctatgatcaggctttttttctatcgatagactttggctatcgacgcataggaagttcctatcggtatacccacaaataccgatcatcgaccatcatcttcgggtttacaataaatggcacgaaccacgacgtgcgagcatagagcatgtcgcccggcgcatcgcgtcaacgcgctgagccggacacgagggggcccgtcgaagcgggcagcagatcgagttcatgcggaacatccggcgggggacgtcgggtgagagaagcgagctgtcatcaagagaggactcaggggcgatgattaccgatctcaaaatcaatgcggagagaaagcaattctactacgagaaaggatactggaccgagaagaccctcggcgacgtatgggccgaccgcgtcgcctcccatccggagcgcacgtacgtcagcgacgaccagggatcgtcctacacgtacggcgagatagacgacaaggcggcgcgcctggcagcatggctcgtcgagcaaggggtggcccccggggacgtggtcacgttccaaatgcctacgtgggcggagttctgcatcgtctatgtggcagccctcaaggccggcgcggtcatgcaccctcttccgcgcaacttcaacgacgccgacctcgtctacggcatgaacctcgtgggctcgagggcgttcatctgccccaccaaagtggcgaaggtcgacttcgagagccagattttgagcatcgtcgaccagataccgacgctgggacctgtggcgctcgtggacaaggcggcgccgaagcactccgagctgcccacggtcgcggagatatgcgcgcgctatgagccaattgaataccccccccccatcacgtctgacgacgtagcctgcatcctgtccacgtccggcaccacgggcaagcccaaagcggtgctgttcacgcataacaacctcatcttctccgagcggtcgttcgtaaagggtaccgagcgaacggcggacgacgtcatgttcatggcatccccgctcaaccacgccaccgggttcttccacggcctcatctcccccatgatcctgggcgggcgcacggtgctgcagcaggacttccgtcccgcgcaagccatcgagcagatgaaccgcgagggctgcacctggtcgatgggtgcgacgccgttcatctacgacatgctcaagtgcatcgagttcgaggacggcccgcggttcgaaacactgcagctgttcctctgcggcggcgcaccggtgcccggcaacctcgtgcagtgcgcgcacggccacggggtcatgctcgccgagatatacgggtcgacggaaagctgcccccacatcttcgtgccccccgcgaaatgcctcgaatggaacggagcctggtcgggcatccccttccccggcatcgaggtgcgcatcgtggacggcgaccgcaacgacgtgccgcgcggcgagcagggcgaggagatctcgcgcgggccgcaccagttcgtgggctacctcaacgccaaggagcgcaccgatcgcgcgctcgacgacgacggctggttctacagcggcgacctcggctacatggacgaagaggggcgcatccgcatcaacgggcgcaagaaggagatcatcatccgcggcggcgagaacatctgcgcgcgcgagatcgacgacgatctgatggggtgccccggcgtgggcgagacggccaccatcggcatgcccgacgagcgcctgggcgagcgcatctgcaccttcgcggtgcccgtcgacgagcgtcgccccaccgtggaggacgtgacggcctacctggccgagaagcacgtggccaagcgcctgtggcccgagcgcatggagtacatcgacgagatcccgaagacggccaccggcaaggtgaagcgcttcgagctggccaaggagctggcgaagcgcatggagaacgagtagggaaacagagaaaccgcagacgatccgaagaaggccggggcaagcgccccggccttctcgcatgcagaggcatcgacagggtgtcatcctgagcggagcgcgagcgaatcgaaggatgacaccctgtcgcgcctcctgcgctcaggacggcagcttgccggactgcgcgaggtattccagctgggcttggatgttgatgcggccggatcgaggcgcgcgtccacgtcctggtacacggcctcgatgatgcggtcgacgtcgagcccggcgcccgcctccgaggcggcgcgcacgcgctccaagcgatcgaggcgatgacggtagacccggtcgatggcttcgagcggatgatcgataagcggcccatgggccgtcagcaggcgcgcgacgttgcgctcgacgaccgtggcgcgcagacgctcgaggctttccaggtacgccgccaggctgccatcgggccagcagatgagcgtggagctttgcttgaacagcatatcccccgtcatgacggacgcgtcggagggcatgaggaagcccacgagatcgctcgcatgccccggcaacggaaccgcttcgaggcgcggcgcgccggcaccgagatcgagcggcccgtcgggcagcgtgccgctccggcgcgacagcaccggcgctcccgtcatcgccgcgaagcgctcggcgccttccgcatggtcggcatggtcgtgcgtcagcaggacggcggccacctcgtgcccgtcctcggcgcaggcgcgctgcacggcgcgcagatgcggcgcgctgtcagggccgggatccaccacgacgcacgcgggcgagcccggatcggccaggatccaggtgttcgtgccgaggtacgtgagaggcgacgggttgtcggcgaggatcacgcgcgcatgagccgacacgcgccggcttccccacgaagcccgacccgtcgcgacgacggggcgctgcatcacggcagcctgcatgtcagcaccgcccttcccccttcgcgcacggcgggttccagcatcacgcggcccgtctcctccacgcctgccgcgaacgactccacgccgggcgcatgcaggaggtgcgccaggttgtaggccgtcggcggcacgaggcgcactaaaccctgcgcggcgcggtcgaacatggcctgcggatccacccatccggcacgatcggcctcgctggtgcggctgtcgggctcctgccctgtgggcgcgagcgcggcgaaaaagtaggtgtcgtagcggcgcggctcgaactccggcgtcagccaatgcgaacgcaagcccagcagatcggcgcgcaaggcgaggccgtggcgcttcagcacgtcggcgagcgaggtctcgtgggatacgagccggcggcgctcctcggcccatgcgggctcggaggcgtccagcgagcagacgccgcgctcgtcgccggccagcagcacgccgcactcctcgaacagctcgcgggcggccgccgtcaccacgcggcgcgccacgtcggcgctggtgcccatgcgacgcgcccaaacctcctcgtcggggccgatccacgagcaccgcgcgccgtcgtcggcgggatccacgcccccgcccgggaacaccacggcctccggcacgaacgccatcgtcgccgcccggcgcagcatgaacacctcgcgcgggctgcgcaccagcattaccgtggccgccagccgcggcacggccggagccgtccctgcggcgcagaacccctcgtaggcgcgggccagctgctcgctcatcggcacttcgagcatctcgcccgacctccacgcgttcatagccccgcctccttgcgcatgcataccatccagctcggttcgccccttccgcgcgacgcgcggaaggagttttcctcatggtatcaccgcgacagagccagcgcgtcggacaacagctcggcgatgtcccgtaccggcagggcatcgtcctgggacgccaggccgtcttccagcatggacaggcagaacgggcaggcggtggccacggcgtccgcaccggtgtcgcgcgcctgctcggcgcgcaggacgttcatgcgccgcccctcgcgctcctcgagccacatgcgcccgccgcccgcgccgcagcagaagctcttctcgcgcgtccgctccatctccaccacctgggcgccgcacgccttcaccaccgcacgcggctcgtcgtacacgtcggcgtagcgtcccaggtagcacgagtcgtggtacgtgacgcgctcgaacgccgcctgcgcgcccgcccgctccgcgcccggcagcctcccttcggccacgagcctctcgagcagctgcgcgtgccgcaccacttcgaaccggccgccaagctgcgggtaatcgcgctccagcgcctgggcgcagtgcgggcactgcacgatgatcttcttcgcgccgtaggcgttcagcgtctcgatgttctcggtggcaagctggtagtacagaaactcgttgcccatgcgccgcgccgcgtcgccgcagcacttctcctccgggccgatgacggcgaagtccacgcccgcatgcctcagcagcgccacgagggcgcgcgacaccttgcggttgcgcgcgtcgtacgctcccgagcagccaggccagtacacgtactccgcctgcggacggtcggccagcgtgggcacgtcgagcccctccgcccatgccatgcggctctgccaccccaagccccacgggttgccgttcgtctcgaggttgcggaaggccgccttagcctccgacgggaacgcgctttccatcgacacctggtaggtgcgcatgcccaccaccttcggcacgtgctccagcagcgccgggcacgcctccatgcacgcgccgcacgtagtgcacgaccacagcgcctcgggcgcgaccacgtcgcccacgagcgccttgtccagcacggcccgctgctcctcggtcggctcgaacgcttcgcccgccgcttcggcccgacgctcggcgcgcacgagcggcccgcgctcccccagatgggcgtcgagcgcctgcatcaggtccttcggcgacagcggcttgccgcttccgtgcgcagggcacaccgtttcgcagcggccgcagcgcacgcacgcctcggcgtccagcaggtccttccatgtgaagtcctccagctttcccacgccgaactcttccagctcctcgtcctcgaggtcgacgtaggacagcgtccccttcggctcaagcggacggcagtacacggtggccgggaccagcagcacgtgcacgagcttcgagtacatccagtacgccaggatcccgaaggcgatggccatatggaaccaccatagaacctggtgcgccgtcgacacctgggcggcgctcaagcctgcgaacagcggcgcgaacagattgccgatgggcgaccacgcggcccacggatcgttcgtacccacgatgcgcagcccctccacgacgaagcccgtgacgccgatgaccagcagccatgccagcacaacgatgtcggccggcttcgtctcgagcgacgggttcctgccggccgcccgccgcacgatgcaggcgaccatcgcgatgcagaacgccaaccccgcgatatcggtgccgagcgccagcacgtacaggtagtagtcgcccttggcgatgtcgagccccaggtccacctgcaccgcatagctcgccgtggccaccaccatgacggccatgcccacgtacatcccgaggtgcgcgatgccgacgccccgctccttcacgacggtgacctgcaagagcgcgtccacgaacgcgcccttcaagcgctcgagcgggcgatcgccgcgctcaagcggtcggccgatcttccacaggcggtagcgccgccagaagaagtacgcggcgacgaccagcaccaacaggaagcaggggtacacgagccacgacccctcgatgttccacagcgcctcgcgcgaaggcgtcgccgcatccatgctaggacgccttgcccgcgcggaaggcctcggtcagaagaggcaccgcctcgaacaggtcggccacgatgccgtagtcggccaccttgaagatgtcggcctgcgggtcgttgttcacggccacgatgcacttcgacgccgccgcgcccgccatatgctggatggagcccgagatgccgcaggctatgtagagcgaaggcgcgacggtcttgcccgtctgtcccacttggaactggatatcggtccagccctcgtccaccgcggggcgcgaagcgcctacggcggcgcccagcacgtcggccagctcctccacgagcgcgaatccctccgcgcccttcgtgccgcgcccgcccgacaccacgatgtcggcctcggtcagctccacgcggcccgacgcccggcgcaccacgtcggccaccgtctggcgcacgtcgccgaacccgtcgacgtgctgcatgagcaccggagccgtgcgaccctcgacgggcgcgtccggttcgaacgccttcgggcgcacggtgaccaccattggccgcgcatcggcggcgaacgccacgtccgcgagcaccttgcccgagtacggctcgcgcgtgaacacgaagccttcctgcgcgtcggcctcgatgcccaccacgtcggcgacgaagccggtgcccaggcgctgcgcgagcacgggagccacgtcgagcccggtggctccgtcggcgagcagcagcgcctcgggctgccgttgcgtgatcagcgtctccagcgctgcggcgtaggcgtcggtggtgtagggatccagcgccggatcgtccagcacgagcacggcgtcggctcccgccgcgccgagcgggtcgagatcgacctcgcccagcccgctgcccagcacgacggccgacacgtcccctccggcctcttccgccattcggcgggcggcagccaacatctcgaacgtcacgcgcggaaacgtcccgtgcttcggctccgcgtatacccatacttctgccatggatgctctcccttcccgtcctaccagaccttggcttcggtttccagcagctccaccgtggcggccaccgcttcggcgaccgtctcgccttccacgatgcgaccgccctggcgcgcgggcttggggcggtagcgcaccacgcgcgtgcggcgcgcccgaggatcgacgagcgcgtcctctatgccgaggtcggccaacgtccatacggtgacgggcttcttcttcgactgcatgatggcgcgcacattgggatagcgaggctcggccagcccctgctgcgccgtgatcacggccggcaatgcaacgtccaccacggccaccccgtcgtcgatctcgcgggtggcgtgcgcgacgcccgccgcagggtcgacgtcgagcgccgtgaccacctgcacgcacggcaggccgcgcagttccgacaagcgcggcatcgtctgcgcgcccgccgtgtcggccgacttgcagccgcccagcacgagatcggccggcacgcgttccagcgcggcggccagcacgcgcgccttgacggcagcgtccgcctcggcgagcgccgcgtcgtcgaccaggtaacccgccgacgcccccatcgacagcgcatggcgcaccgccggcacggcctcgtcgccgccgacgcacacgacggacacgtcgccgccgtgctcctccgccagctgcacggcccgctccacggcgaactcgctgtacgggtcgatgacgagcgtctgcccctccgtgagcgcccgcccttcggcgtcgacgcccacctccgcttcggtgtcgacggtttgcttgatgcagactgcgatgtccatagccgctgccctcctcgctttcgcgtgcgccgccctgcgacgccgcactcctcctagtattccttcagcaccgatttcgcgataagcgagcgctgcacctggctcgtgccctcgacgatggtgaacgacttcgcgtcgcggtagtagcgctccaccggataatccttgcacaggccgtagccgccgaatatctgcacggccgtctcagccgctttcaccgccgcctccgagcagtacaccttcgccaccgacgccgtcttcatcatcgtctggatgtcgccgccgaacgccgatgccgcctggtccaacagcaagcgggacgcttccagcgtgatctccatatcggccagcatgaagcggatggcctgcaagtccgcgatatgctttccgaactggatgcgctccttcgcataggcggccgcggccgcgagcgaggcggccgtcacgccggtggccagcgccgccacggccaagcggccgcggttcagcgtgtggtgcgcgatggcgaacccgtcgcccacctcgcccaccacggcttcgggtcccacgtgcatgttctcgaagtacagctgggaggtcactgagccgcgcaagcccatcttgtcctccttgcggccgatcacgaggccgggcgtgtcgcggtgcacgatgaagcacgacggcttcgactgcccgtcctccaccacgcgcgcgaacacggtgaaccagtcgcccaccgctccgttcgtgatgaatatcttgccgccgttgatggtgtagccatcgccgtcgggcaacgccgtcgtggagatggcggagatgtccgagccggcgttcggctcggtcagcgcgaagcagatcttcgcctcgccagccgccagcgcgggaaggatggcacgttgctgctcggcggatcccgagaacacgagcgcgtcggacccgatggccgatatgaggatcatgagcgccacggccggcgattcgcgcgcgatgcgctcgatcacctgcacccagcagtgcatgctcacttccacgccgccgtgctcctcgccgtaggcgagcgcgaacagcccctgctccacgaacagctcgtagatgtcctggggaaactcgtcctcttcgtcgatggcagccgcacgctcggccaccacgtcgacgcacaggtcgtccaccatagaaaggatcatgcgttcctcttgcgtcagctcgtacatgcagccccttccccgcgcgaaacggccgccgcacccggaaggggcggcgatccattcctatttcctattgattcccctttaaataataggttccgtctatcgcttgcctacggtcaaaacgacctccctgggcatatagactggtcaaacgagtttgtttgttggccttcatgtcatccaactcgtcgatttcgcaagaactcgacggttcatcacacctgcggaattcaaaaccgcacactcgcggcaaaatagccggtcaatccgcgccgacgctgctctatgatctttacagcaagaaaccccgcgcgaaggagcatcccatggccggatcggtacggcagatcatagaagtcccctgcaccgtcgaggcgctcgagcgctcggaggcgctttcgcagctcgcacccgaagcgttgaccgcgctcggcgcggaatcgatcgacggcgacgccctcggcgtcgaggcggcggcccgcgtggacgccgcaatcgaggcgtgcctggcggcctacgaccctcggggcgtgtacaagctgttcaaccccgccatctgcacgctgccgcccgagtactcggagccggccatcaagctggtgggcaccatgatgatgttccacggccaaagcgtctacgagcgcctgcgccgcgctgcgcactgcgcgctcatggccgtgaccatcggccccgacaaccccgccgcgctgcccgccgacgccgacgagctcgaccgcgcgctggccgacgcctgcgcccgagcgctcgtggaaagcgcggccgaccacgtgaacgccgccatcgtggccgcggctatggaagagggcctctacaccgacgatcgcctgagccccggcatgggcgacttcccgctggacacgcgctcgcagttcgtgttctacacgcaatccgagaagcgcctgggtctgaagctgggcaaggacggcgtcttcgagccgcgctacagcacggtgggcgtcatcgggctctacgacccgtcgcacaagggccgcaagcgcgcctgcgggcgctgcaagtaccgctcgtactgctccatccgcgccatcggcatgacttgccacggcggcaagggctcgttcaagtagaacctgccggcccagcccgatatcccgagcgggcgctccgctcgggacgacacgcaaaacgccccggccgaagccggggcgttctttcttgcttgttgcagcgtcgggttagatcgtgtacaggtaatcgggatcctcgacgaccttcgcgtactccttgaggatgccgcgaccggagatgtgcaccatgatctccaccgtgccgccgccgatctggaagccgcggcagtccagcatgaggcgggacacgcgggtctcgtcggtgaagccgaggccgcccatgagctgcagcgcgcgcgagcagcagtcggtgagcgccggagcgccgtagcgcttgagcatggcggcgtcgttgttcaccgggatgccgttgtccatcttccagcaggtgcgatacaggaagttacgcgtgttcgagagctcgatctgcatctcgacgatgtgctcctgcacgagctggtaggtcttgatgcccttgccgaactgcatgcgctcgttggtccaggcgcacgcgtcctccatggcggcctgcgcctcgccgagcagctcggccagaagcacgcagcgctcccactcgaagttcttcatgagctggtagaagcccttgccctggatgcccaggaggtcggtctcgtcgatgaccacgtcgtcgaagtggatcatcgcgaagggcatgatctgcatgccgatcttgttgagcggctcgatggtgacgcccggcgcgttcgccggcaccaggtacatggacatgttcttgttctcgcgagacggatcctcgtccttgcacaccacgatgaagccgtcaacgtgctcgccctgggtcacccaggtcttcacgccgttgatgtgcaccttgccgtcgcccgtgcgggtggccaagcactccatgccctggttgtcagagcccgcttcgggctcggagatggccaggcagtacggcgggtagccgttctccttgtagtagtccatcgcgaacttgatctgctccggcgtgccgaattcgcacacgtcgaacatgatgagcaggttgggagccatggggatgttgccgccggcatggttgagctcttcgatgatcatggccatcgtctgatggtcgacgggctttccaccgtgttcctcgggcaggccgtacatgccccaacccgaatcgacccacgccttcgccacttcgggagcgatgccgcggttcttgtagccggccgcgatgacctcctccgtcaggttctccttggcccactcgcggatgcccttcttgatgcggagctgttcctcggtgtatgcgaaatccatgcttcctccttaacgttttccctatattcgaaacacgcaagcgtgtttgaacccttatgcgggatgccgaccttgcagcgatgcggcatctccgcttcgatccgggagcacgcggtcaagcgcgctcccggcagtgcccgatcgttcgcgcctacagcgccatcgaagcctggtagccgcccttgacggcctcaagagtgcggtagaccttgccggccggcgtggtcgcgtcgccgatgagcttggcgttcgggaacgccttcgcgatctcgtcgtagagcttggtgttctgctcgacgcccagcgacgtgagcacggtgtcgcactcgatgagctgctcttcgccggtctccacgttctgaaccttcgcgcccttcttcgtgacctcgacgagcttggtcagcggcatgagtttcacgcccttggacttcaccaggttgatggtggggttcttgtcgatgatgccgatgccgttgcccatcttcttggcctcttcgatgaccgtgatctcacggttctcgcacatggcctcggcaacttccaagccggcgaagccgccgcccacgaccacgacgcgcttgcccacgatggcggtggggccggatgccatgttcaggcccatgcgcatgaagccgacggtgccgccctgcgccttgatggccgccacggccgccttccacagcatgcccttgccctcgggcaccttgcccgcgcacatctccttgatgtcctcggacttcaccacgttcttgccgtcgatgccgggcacgtccagcgagatgatgccgccgccgggcgagacgatgacctcgtcggggttgagcgccttcaccgtgtcgacgtcgacgtaggtgttcagcttcagctcgatgttcgggtgcagcttcatctcctcgttccagtaggacacgagcggctcgatcttggcgttcagcacctgcgccatgcccagcaggccggcgacgcggtcggacttgtcgagcacggtcaccttgtggccgcgcacggctgcgacgcgagcggcttccaggccgccggggccggcgcccaccaccacgacgtgctttttcgcctcggccggcttgtcctcgggcagacccacctcgacgccttcccacacgttggcgttgacggagcactggcagggcttgccgatgaagatgttgtccaggcagcggctgcacacgatgcaggggcgaacctgctcgggatggcccgcggccaccttggcggccgtgtcgggatcggcgatgaactggcgagccatgcccaccgcgtcgccgtaaccctgggtgaccaccttgtcgcacatgtcgagcgtgttgatgcgggttccggggaacaccggtttgtcggtgacggtcttcacctgcttggcgaggtcgatgaactcgccttcgggaacgatctggttcgccacgggacgcggagcctcgtggaagccggcctgcacgctccaagcgtccacgccgtgcttctcgacgatcgggatgatctcgagggtgtcctcgatgcggttgccgttcggcatgaggtcgtcggcggagatgcgcaccaggatgggcatgtcgtcgccgcaggtcttgtggatctcgtcgacgatctcgcacaggaagcgggcgcggttctcggcgcttccgccgtactcgtcggtgcgatggttggagtacttggacaggaagcgcatcaccatgtagccgatgccggcatggatctcgatgatgtcgatgccgctgtccttggcgcgcttggccgcttcgccgtactgcttcaccacgacggcgatctcttctttggtgtattcgcgctcgggcatgcccacgaacgggccgctgggaacgtctttggacggagcgtaggacagcagcgggtcggagccgctcgcacgccactcgtagcacagctgcagctgcgcggccaccttcgcgccatgcttatggcacgcctcggcgacgcgctgccaacccgggttgaactcgtcggaccaaatgccgcaggctccggtggtggtgtgatacttcggctcggtatcgaagcaatcgcagatgtacgcgctgccgacctcgatcaggcccacgccgcccttggcgcgctgctcgtagaagtccaccaagtcgtccgaaatatgatagttgtcgaccttctcgatcgtcatgggcagcatgacgaaccggttcctgatctccaccccgccgatgctgaacggttccagcagcttctgatactttgccacgatgcaaacccctttccgcttttgaacagtgccaagcgtctctctgcgcgattggcgcgaggtcgatccgtgcgaactatccctctcgaagagcacggtttcctcgttgccatcattgtaggctccgcaaaaggacgatacgatggacagaatttccatattggtaagtcatcgtgaaaaaagtctcccaatattgcttaggatgagtctctttttaccaggaatatccccaaatcgccccttctcgaccggaagagtcgaagtttatcactgcacatattttgaagtttgtcctagaaatgtacgaaaacgcgacgtataatagccgtggcacaatcatcattaccgagagcgaggcccgactccatgaacgcgctcagcacgatgctcctcatcgccgacaccttcgtcgcgctatgcgacgagatgccgctcaagaaggtgtccatcagcgacatcatcgagcgaacgggaaagaaccgcaagacgttctactaccacttcgagaacaaggactgccttatcacgtggatcttccgctacgacctcggtcaggagctcaaacgccgcttccccgaaagcacgctcgtgtacgagaccggtgcgaccgactcctccgcgcagttccccttctacatcctgcagaagtcgggcgtgcgctcgctcgatcacgccgagttcttcgactgcttcgcccatgtgctggaagcgaagcgcaacttctacacccaggctctcgccgacacgaacccctactcgctgcgcaactacctgtaccacctgtacctgcccgcgctgcgcaacgacatcgacctcatcttggcgaaccgctacctgccccaggagaacatccagttcttggccgagttctacacctgcgcgtttctgtactacttcatccgcaagtgcgaccagcccggcgccgatcggctgaccgggcaggccggccccttcgccaacatcatccacagctccctcgaggcgcagatcaaggaagcccagcttcgccgcaacctgtaattcattcgcaccctgccatcctgagcggcgctagcgggaagactcgcggctagcgccgcacgagctccttcggctccgcaccttcggtgctgcgctcaggatggcagggtgcggcgcgcattcaggcgaggaacttcggcggcagcgcgcccgctcccagctcgcgcacggcagcgctcatcggctgcaggtgcgcccccacgagcatcttcgacgtcgcgtgcgccaagagcctgccttcggcgtcgcgcagctccgcttcacataggcacatggtgcgcccgcgcttgacgacccgaccctccacgacgaccagtcccggccccgacgcacgcaggttggacgcgttcaaatcgactgtggtaaagccttcgtcctcgtcgagcgagcagtacagcgcccagtacgcagcgcaatcgagaagcgacgcgtacgcgccgccgtgcgcgccgccgaacgcgttgaggtgcttgcgctccaacacggcctcgaccgtgcacgccccctccgagagcgccgtcaacctgatgcccagcagctcgaagtacggcgaacggttgatcagctccatcaccgcatccacgtgcctcggattcacctgcgccatatcacgtccttccctcgacgccctgcgtcgctgcgcttgcgcggactttctttcatggtagcaagcgagaagatgcagcgacatgggcaaaccccgccgttcgagtcgttgtcgaacgcccgcggatcgcagcacctcgggcgcgccggcctgccccctcccgaaaacgacggcggcccgtccgaagacgggccgccgctgccggttcgcttcgcgcgctagcgacgatgctcctgcttatcgttgagcaggcggttcagcgcgttgaggtaggccttcgtggacgagacgatgatgtcgttgtccgcgccgcggcccgtgtacacgccgccgtcgggcgcggtcacgcggatggtcacctcgcccagcgcgtcgatgccgcgcgtgacggactgcaccgagaactcggtcagctcgttgtccacctgcacgatcttgttcacggccttgtacaccgcgtcgatcggacccgtgccgtactcgcaggcagtgaccacctggtcggccgcgttgcgcagcgtgaccgtggccgtcggggtcagcgggaagcccgtgctcacctgcacgccctcaagcgcgtagagggcgctctcgttgcggtcgcgctcgttcacgaggctctcgaggtcctcgtcgtacacttccttcttcttgtcggccaggttgaggaacgcctcgtacacctggtcgagcgcctcgccctccagctcgtagcccagctcctccagacggtgcttcaaggccgcatgccccgagcgcgccgtgagcacgatctggctcgtgcccgcgcccacgtcggccgggtcgatgatctcgtaggtgtcgcgcttcttcagcacgccgtcctgatggatgccggaggagtgcgcgaaggcgttcgcgcccacgatggccttgttggcctgcacgttcatgccggtgatggacgacacgaggcggctcgccttaatgaactcgcgcgtgttgatctcggtgcaggcgtccagctcgtcgccgtgcatcttgatgcccatgaccacttcttccatggccgtattgcccgcgcgctcgcccaagccgttgatagtgcattccacttgggttgcaccgttcttcacgccagccagcgacagcgcggtggccatgccgaggtcgttgtggcagtgcaccgacaccgtggccttctcgatgccgtccacgtggtccatgaggtacttgatgcgcgcgccgaactcctcgggcagcgagtagcccgtggtgtcggggatgttcaccaccgtggcgccggccttgatgacggcttcgatgacgcgcacgaggaagtcgtagtcggagcggcccgcgtcctcggcgtagaactgcacgtcctcgacgaagttgcgggcgtacttcacgcacttgaccgcacgctcgacgcactcgtcctcggtaatgcgcagcttgtcgcgcaggtggctcgggctcacgccgatgccggtatggatgcgcggacgcttggcgtacttgagcgcgtcggccgcggcgtcgatgtccttctccaccgcgcgcgtgaggccgcacaccgttgcctggtcgcctgcgagctccgcgatgcggcggacggactcgaagtcgccggggctcgagatggggaagcccgcctcgatgacgtccacgttgagccggagaagttgacgcgccacgaccagcttctcctcggtgttcatggaggcgcccggcgactgctcgccgtcgcgaagcgtcgtatcgaagatgttgatcttgcgcgtcatatgcgtgttccttccttctcggctcgatatagtttgactatcatagcaaatatcccaagcgctcttctcggaattcgccccgaacgcaccaacaaaagcgggaaaacgacgggaagacgcctgacccgaaaaaggctcggcaagcgcggggatcgcttgccgagccgtgatgccgcagcgtgctcggagaggaggtcgcgcacgctagcaggagggtgagctcgctttcgcgtcggccacgccgtgggcagccgcgtcggcgtcgatgaggtcggtcggcttcgccttcatgatgaagcgctcgacgaggatgaggaaggccagcgcgcccagcgcgatgacgccgagaagcaccgcatactccacccaggagggcgcgtaccagctggtcgccgcccacacgtccatgccggaggtagcggccgacgtgccgtcgatgagacccgggccgccgaaggtgttcggcgtgatgaacgagctgaacagcagccacacgcgcttgcagaacacgcccaccaccacgcacgccgaggagaacacgatgaggccggtcttctggcggttcttcgcgaacacgaggatggtgaacgggatgagcacgcccacgatgatctcgatccagaagtacggggccgtggcgccgaagaacatctgggacagcacgtgccagccgccctcggaaccgggatagcccgtggtcagaagctcgcaacccaccatgtagccgtcgacggcgatgcaggtggccagaaggcccgccagcatgcccatgagcttcttcgacgtctcccagatgccgcggcggttcatccacgccagcgcgatgagcagaagcgccaggccggaatccatggccgaggccacgaacaaggggcccatgatggccgaatgccagccctcgcgggcgatctgcaggccgaatatccacgccgtcaccgtgtgcacgaggatggcgatgggcagggcgaaacgcgacacgatggcgatcttggacttgtcggctctcttcgaggtcatgaagtacaggtagaccaggttgatgaccaggtagcacgagatgacgcagatgtcccagaacagaggcgagatgaagttcggggaaatgatcaggttgaagatgcgcgccacgccgccgaggtcgaggatgaccagcaggcccgcgcagcagatgcacaccgtggacacgcacacggccggcagcgccaccttcttgaactcggtgacgtggaagatcgatgccgatgaggccacgatcaaaccgccggcggacaagccgacgaagaacatgaacgcggcgatgtacaggccccaggaggtgccgttgttcatgccggtcacgcccaaaccgaacatggtctggtagatccaggcggccgcccccgcggcggcgatcacggccagaaccaccatgaccggacgggagattcgcttcgtttccatctgggcccccttacgcgttgtagtaacggagctgcgggcgggtgccgaactcctcgagcagctgataggcatggttctcgcgcacgaccttcgagatctcggactcgggatcgtccaagtcgccgtacacgcgggcgcggcccgggcacacgcgcacgcacatggggatgtcgccgcggtcggtgcgctccttgcacagcgtgcacttctccgccacgcccttcgggcgcaccggcacgtccttgtcgccgtagttccagttgggatcgcgctcgggctcgctccagttgaacacgcgggcgttgtaggggcaagcggccatgcagatgcggcagccgatgcatttgtcgtagtggatttccacgcgacccatatcgtctttgtacgtggcgcccacggggcacaccttcagacaggcggggttttcgcagtgctggcacgccacggggatgtaggtgcggctgaggtcggggtacgtcccctgcgcgccgtcggcggtatccacgccgtcggtctccacgcggatgtacagcatgttcatgggtatgttgttctgcatcttgcaggcgttcgcgcaggtgttgcacccgacgcaacgctcaaggttgatggcgatgccaagcttggtcatgatcgctcacctacgctttcttgatttcgacgagggtatcggagaacgggatgaccgggccgcacatgagctcggcgcctcgctcgacgtagccgtcgttcgtgacgttctggacgttgccttcgatgaggaagtcggccgtctgcccctcgaacatgcgcgcgctgccggggcggatggactcgttggccttcacgcggcacttgaaggagccgcggtcgttgaacacttccaccgcatctcccgtggccaggccgcgcttctccatttcagaggggttcagctcgatgcgcggctcggcgaactgctggatccacttggcatcgttgaactggttgtggatgcggtagcgcgtgcgcacgttcgccagctgcagcgggtaggtttcggccagcttgttgccggcgtgcgcctcaagcggcggctcgtaggcgggaagcgcctgaccgtattccacaagagcgtcgtagtagacgtccatgcgcgtggagggggtggcgaacacgcggtccatgaactctcggcgcggctcctcgatgccctcgaggggatacacgccgttcgcagcgttgatcttgtcgatggtgagcgcggagacgtacgggtcctcggaggaggacagcaccttcgccacccattcctcggacgtggcgggcaggtactggtctttgccgaaacgcttggcgatttccttgccgatccagaagtcggtgcgagcctcgaacaacggctcgatgatcttgttctgcagcacgatgttgctgtagccgatcttcacgctccccacctccgcgtcgttctcgaagcgcgtggtggcgggcaggatgacgtcggcccacttcgcgccctcggtgaagtacgggtcgatggtgacgatgaagtcgaggccgcgcgcgaactcggtggtcttgttcatgttgccgatgtgctgctggagcacatcgccgcagaagatgcaggcgcgcaccttggcgttaccctcgcgggcatcgtacagcggcatctccagcgtgctggccgtcatgtcctcgggaagctcccaggcgcccagcgtgcccgcatggccgttgtagctgccgcccacgaacacgcccacgccggcgcccaccttgcccacgttgcccgtgagggccacgagcgttgcggcagcgtggccggcgatgtcggcgttgcccatcttgtcgttgccgccccagcccagcgccaggcaggcaggaccctcggcgtactcgcgggcaagttggcggatggtggcggcgggcacgccgcttacgctttcagcccactcgggagtgtactcgacctgcttctgcttgaggagcgagaacaccgtggtgcaggatgcgccgtccacgtcgaaggtgccctcgagagcgggcttcacggccgcgacgtcgtaggccgccttcgcgttcgtcgccgtgtcccacacgaagaaggggttctgctcgccggtctcgggctcttcggcgtcaggatcctccgcgtggtcgcgcacgagcttgcccgtcgcgacgtccacgaggaacggaagcgaggtgtggttcagcacgaagtcctcgtcgtagagctgctcgtcgaggatgacgctggccatgccgaggaagaatgcggcatcggtgcccggcgtgatgggcacccactgatccgatttgccggccgtcgtggagaagtggggatccaccgtcaccatgcgggtgccagcttccttcgcctcgaagaacaggcgcacgttgggcaggctggactccaggaagttgctgcccacgttgagcacgagcttggaattcacccagtcgcgagcctcgcaggtggccatcgcgtagccgccgccgaaaccgatggcaggatccaaaccgttgccgatgcccacgtcgatgccggagctggcatccacctgcgcgcccagcacggcggccagccacgggaagttcgcttcggcgcccgtcgagatgaccacgcaatcgtttccgtacttgccctggagctccttgagcttgtcgcacacctcgtcgagcgcttcgtcccacgagataggctcgaactcgcccgcgccgcgctctccggtgcgtcgaagcggggtctgcacgcgatggtcgccgtagatgtgctggacctcggaaatgcccttcacgcagatggtttcgtaccggtcgtcgcagcagtggttcggctgaaccgacaccatgcgcccgtcgcgcaccgtgcacgccagcgggcacatgccgccgcagtgggactggtggtaggtgaacgccgtgtactcctcggcggtctcggcatgcgccggaaccagccatccgtcagcggaggtcatcgcccccgccgcgcccaacatcgccaggccggcgcccgcgacggcggttcccttgacgaaaccccgacgcgtcacgctcatctcgtctgtggtcattgcatcccctttctcagtgactcatgaccgtttcctcgacctctaattaactgttttcatagtaatatagttaaataggaaattgaatatgttcatttcaagaataatttagacgtctgcgaacggtgcggaaaacgcggcgaaggtcgcgagagcgggatgcccttgcgaccttcgccttgcgggagcaacgccttgtcgacatcgtatgcccatgtcagttatcatatattaccttttggaaaatgttttaccgagcgcagccgcgccgtcattggaagcgtccgctcccctatcgcaccatagcagaatccgccgtcgcgtagttggcctttccgatcccgcaaccaaccgttcgcgaacgagcggccgacggtgtcggacaggcgaagacgctcgatcgggctatcggcgagatacggattcaggagagcggcggcgcctgcggcgggcagagccggaccgtcagcaagccggcgacccgcatccgacggccctgatgtttcacgtgaaacatttgtacgtttacgggcactgccgagaggatggcgcccttgcttgccgcagaaggggctacttcttccccttgagggcggaggctatgtcgcctgtgaagccctgggcgtaggggctcggcaccaccaccatgttgccgccctccttcacgctctcgttcacgaggctcatcatgcgcagctgcagcgccaggtcgtcctcgcggtaggcatgcgcggcctcgatgaacatgtcggagatgtccttctcaacctcggccagcacgacgcgggcgttgcgctcctgctgcgcctgggcctcggcgctcatggcgttctgcagctcctggggcatgcggatgtcgcggatctccacgtcgttgatggtgacgccccactgctcagtcttctcctcgatgctcttcttcagttggtggtcgatatgcgcgcgctgcatggacagctcggcgatctccacctggccgatggcgtcgcgcagcgccgtctgcgccacgagcgacgccgagtgctcgtagtcttccacagccaggcacgccttcttcggatcccacaccatccagaacacgacggcgtcgagatccaccggcacgagatcggccgtgagcacctgctcggccgaacacgagatggacgagatgcgctggtcgatgacgatggtcaccgaatccaccacggggacggtgacgtacagacccggcccggcgaggcggtggaaccggccgaagcgcagcaccacagcacgctcccattcgtaggcgatgtgcacgctgcctgccagcgccaggccggcgaccacggcgagcgccacggtgaacgccgagcggaaggggaacgtcgcagccaggacaagggcgaacgcaacgaggaacagcgtcacggccagcaccaccgcaccgcggcgcgatgccttgcgcctgccggagacgctctcctccccgcctgacagcacgtcgttcgcacgctcgttgccgcgtttgccgaacttgaccatagctcgctcctatcccatccgggaaatcttgtcctgaaggcgacccgctatctcttcgcgcgtcatgcccagctcctcgcactggcggatgaaatcgcccatcatcgcatcgatggttgactccagggaatcctcgtcgtcgaacgcgggattctcggcgacgaaggttccgcgcccgcgcttcgacatgatgagacccgacgtctccatgctgcggtacaccttgttcacggtgttgtagttgatgttgaggttgacggccatctcgtgcacggtgggaagctggtcgccgggctggtagcgcccggtctggataaggtagacgaggcggttgcgaagctgcacccagatgggcacgccgctgcgttcgtctatgctgaaattctccatgccccgagcttcctcgcgccgtcgtcggctggcgcggattttcctacatctctagccaaatacaaccgtgtatattctagcgcgcttcgtcggcatcgccggcgagaatcgcgcattcgcaagcacgaaacgacgacagggcgagacgacgagacgagggagcgagacgaggggacgaggttgttgcctcattctgcgatcgaagcgggacaccgaccccgccccttcgtctcacaggtacgacgcgatgtccatgaagggagccgtgcacaggcagtaccgcaggaagaagccgcctatcagcaccagcacgccgatgcaggcgcaggcgcgcgcgtcgggacgccgcagcgccgcctccagcgcgaagggggccgcgatgcccaccgccgcgagcgcgccccagaacgcgggcgccatatcgcccgtcagcaggcgctgcgcggccgcgctcgacagcacgtcaccggccgccgcaaccatgaaggccgtcagcacgacggcctcgagcgccagcagcgcgccgtcgatgcgggagagccgcgcgaacaacggctgcggatcggcgtcgcacagaagcggcagcacgagcatcaccgccgcgccgcacgacagcgacgagcaggtgaacagcaccggcacgagcggcgacgccagaagcggcagcgtccagatggtggagaggaacagccccgagtacaccatcaccacgagcgcgctcgcgcagccgagagcctgcacggccagcacggcgccgcggccgagcccgagcacgcgcaggttgcacgcgaggagcgccgccacggcggccatgaacgccacgagcgcccacgccccgaccgacagcacgctgccagccgggttcgccaacacgtcgagcgcgagctcgggccgccccaggtccagcatgaggcacgcggcgcccactgcgaccatgccgcacgagatgacgagcgacggcaaggccacccgcccgagcgagcgcctcagcgcagcggacgagcgcgcccgctgcgacaggtacacggccgcgacgaacgtgccgcagcccgcgcccgccaagaacaggtagatgacgatgagcgggccgaacatcgcgccgccgctacagcttcacgtaccagaggtttttgaggtcgcccagccccgcgcgcagcttggacagcacgtcgtcgtcgacgtcgccctccacgttcatgtacacgagcgcgcattgctcgccgggcaacgtggcgatctgcatcgtggtgatgttgatgcccgcctcccccaggatggtgccgatggtgcccacgcgccccggcgcgtccacgtactcgaacacgagcgactgaccggccggagcgatgtccagctggtagccgaacagcgacacgaggcgcgcagcctgcgcttcgcccgccagcgtgcaggccacttcggtgccgtcggccaccaccgacacggtggaagcgtagcccccggcgtcgggcgacgaaagcgtctccaccttgatgccgtggcgcttcgccaccgcgtcggcgttcaccggcgtcaccgtggccgtgctctggtaggacaggatgcccttgagcgtgccggcaacgaggatggacgcgtcggcgtgcgccagcgcaccggccgtcgtcagcttcaggaactgggggatctcgccgtcgatctgcgcgagcatgctgcccatcatctggcaagcgggcacgtacggtcccaccgcgtccatcacctcgggcggcacgggcgccatgttcaaggccgtgggcacgatggatccctcgagacccgccgccacgtactcggccgtctgcacgccggctcgcagctgcgcctcctgcgtggacgccgcgatatgcggcgtgaggatggcgttgtcgaactcgcgcagggggctgtccgtgcagggctcgctttcgtgcacgtcgatgccgaccgcgccgatcttgccggcggccaggaagtcggcgagcgacttctcgtcgaagatgccgccgcgcgcggcgttcaccaggatcacgccgtccttcattcgcgcgtactggtcgggcccgaacatcccgatggtctccttcgtcttgggaaggtggacggtgatgaagtcggccaacggcacaagggcgtccacgtcgtcgtacagcgtcacgcccagctgctcggcgcgctcggggctgcagtacgggtcgtagccgatcagtttcatgccgaaggcgcgtgcccgctcggccacgaggccgccgatgcggccgaggccgaagatggcgagcgtcttctcgtacagctccacgccggtgtacttcccgcgctcccagacgccctcgtgcatggacgcgttcgcctgcggaaccttgcgcgcgcaggcaagcatgaggccgatggcgtgctcggcggcggacacgatgttggacgtgggcgcgttgcacacgatgatgccgtgctcggtggccgcttcgacgtccacgttgtccacgcccacgccggcgcgcccgatgatgcgcaggcgatcggcggcttcgacgacctcggccgtgaccttcgtggccgagcgcacgatgagcgcatcgtagccgggaacggtctcgatcagctcctcgggcgtcatcttcagcttgacgtcgacctcgcaacccttgtcgcggagcactgcgagacccgcctcggccagcctctcggtaaccagcaccttcttcgtcataacgaaaaccacctcttgccttatggatgtcagggaaacagtcccgcccggcgccggccgcacgcgttcacgccgatcgagcaaacgtccttatgatacggaaaaaccccatggatagatgcacgggctgcgaaattcccgatgaattgcgaaaacgcgcgtccgactcggcaagcacggcgaaaagcgaccgcgcggctgctttggtgcggtattgtagacgttctcgcacctcccgtcgggtatcctattccgacgtaccgaaaagagaagggaacgccatgcagaagaccacctcgcagaaagccctcaaggtcatctccatcatcatgatcgtgttcgcggcgctcacgctgctcctcggcatcggcggcatcgtcaccggcggagccctcggcatcctgggcgcgggcagcggcgacgccggaagcgccgccctcgtcggaggcgtggcagccgtcgccggcttcgtcatcctcctcggaggcgccatcaacctggccatcggcatcttcggcctgcgcggcgccaacgacccgcgcaagatcggcgcgttctacgtgctggccatcatcgggctcgcgttcgccgtgctgagcgcgctcggcaccttcttcggcggcagcgcggacggcggcgacatcgccagcgccctcttcggcctcgtcctgcccctcgtctgcgtgcttttggcctacaacatcaagaaggagaaccacctgtagcggcccgcaggttcgttcccgcacgtgaaagaaggggcccgacgtcgggccccttctttgtgcgaagccgtctccggcgaatcgaacccgtctgcccgcgcttctccgtctgcgcgggcgacggaccgcagtcctacctcctcacgaagctgaacatcgagcggatgttggcgcccacttcctcgatctgggcgttgccgtgctccatgcgctgctctttgagccacttctggccgttcttcgagtcctccatgaactcgtgggcgaagctgccgtcctggatgcgcgcgaggacggtcttcatcgcggctttcgtctcgtcggtgatcacctgcgggccggcgtagtagtcgccgtactcggccgtgttcgagatggagtagcgcatgttcgacatgccgccctcgtacatgaggtccacgatgagcttcatctcgtggaagcactcgaagtaggccatctcgggcggatagcccgcctccaccagcgtctcgaagccggcgttgatgagcgccgtcacgccgccgcacagcacggcctgctcgccgaacaggtcggtttcggtctcgttcttgaacgtggtttcgatgacgccggcgcgcgcgccgccgatgccccacgcgtacgacagcgccacatccttggcctggcccgacgcgtcctggttcacgcagatgaggcacggcacgcccgcgccttcggtgaacacgcggcgcaccatgtggcccgggcccttcggcgcgatcatgaccacgtcgacctccgcgggcggctcgatgtagccgaagtggatgttgaagccgtgcgcgaacgccagcgtgtcgccggccttgagatgcggggcgatgtccgcttcgtacgtggcggcctgggtctcgtcgggcgtgaggatcatgatgaagtcggcttcctcggcagcgtcggcgacgctcatcaccttgaggcccgcctcctcggccttggcccgcgagcgcgagtcctcgcgcaggcccacgcgcacgtccacgcccgagtccagcaggttgagcgcatgggcgtggccctggctgccgtagccgatgatggccaccttcttgtcctggatgagctgggggttcgcgtctttctcgtgatagatcgtgacagccatgttcgtttttcctttctattggctgaggttacctggtgttcgggatgcgccgcgcgagcctcacacgtcctttgaattgcgggacatggcgattttgccggtgcgggtgatctccttgatgccgtaggcgcggaagaggtcctccatgcccttgagcttgctctcgtcgcccgtggcctcgatggtcagcgagctgcggcccacgtccacgatcttcgcacggaacacgttggcgatctcgatgatctcgttgcgacggtcgggctgggcgttcaccttgaacagcaccagctcgcgctcgatggccgcgtcgttggtgaggtcggtgatcttatgcacgctgatcagcttgtgcagctgcttcgtgatctgctcgtaggccacgtcgtcggccttcacgatggccgtgacgcgcgacatggtgggatcttcggtggggcccaccgacagcgactcgatgttgaagccgcgccgcgagatgaggccggtgacgcgcgacagcacgccgggcttgttctccaccagaacggacaggatgtgcttcatcggtcgctcccctcctcgtcgcttccatcggcttcgtcgccttcgggcacgtcggtgcgcacggcccccacggccacgtcgatggcgccgatcacctcgtcgagcgcgcggcccggcgccaccatgggatacacgttctgatcgcgcgagatggccacgtccagcaggtacggcccatcgcttgccagcatgcgcgccagcgccgcgtccacgtcagcgggcttctccacccgctcgccctgccagccgtacgcttcggccagcttcacgaagtcggggctggcgtccagcagcgtcgaggagtagcgctcgtcgtagaacagcttctgccactggtgcaccatcccgaggcagcggttgtccaggatgagcaccttcaccggcacgcggtggatgctggccgtggccatctcctggctgttcatctggaacgacccgtcgcccgccacgcacaccacctgcttctccggacagccgatggccgcgccgatggcggccgggaagccgaaacccatcgtgcccaggccgcccgacgacaggaagctgcgcggcgcctcgcggtccacgctctgggccgcccacatctggtgctgccccacctcggtcacgacgacgctgttctgaggatcgagcgactccgacagcttcttcagcaccacctcggggacgatctcgtcggggtcgtcccccacgccgggatggtagaacgggtagcgcgtgcgccaggcggagatctgctccacccacgtgcccgtgccggggcgcgcgccttccttctccaacgtcgacacgatgccggccagcacgcccttgaggtcgcctacgatgggcacctgcacctcgcgcaccttgccgatctcggccgggtcgatgtcgatgtggatgacgtcggcgtgcggcgcgaactcgtccagcttgccggtgacgcggtcggagaagcgcgctcccgccgcgatgataaggtcgctttccgtcatggcgaggttcgcgtacttcgagccgtgcatcccgacgggccccaggttcagctcgtgggacgcggggaacgcgcccttgcccatgagcgtggtgaccacgggaatctgcatgagctcggccagcgccttcagctcttcggacgcgccggaggacacggtgccgccgcccacgtacagcacgggacgctctgcttgcttgatacgggacacggcctgtttgatctgcttggcgttgccgcggtaggtgggcttgtacgacggcaggttcacgtcgtcgggatactcgaacgtcatgagctcgctggccagatccgacgggacgtcgatgagcacggggccgggacggccggtcttggcgatgtggaacgcctcgcggaacgtagtcgtcaactcgtcggtagactgcaaaaggtagctgtgcttcaccaccggcatggtgatgcccacgatgtcggactcctggaacgagtccgtgccgatgacgccgcgcggcacctggcccgtgatcaccacgagcggcacgctgtccatgtaggccgtcgcgatgcccgtcaccgtgttcgtggcgcccgggccgctggtgacgatgaccacgccgacgttgcccgtggcgcgcgcgtagccgtcggcctcgtgcacggcgccctgttcgtggcgcgccagcacgtgcttgatctggtccgagtcgtacaacgcgtcgtatattttgatggcctggccgccgggatagccgaacacgaggtcgacgccctcggcttcgagcgaggccaccacggcctcggcgcccttcatcgtcttgccctgcttcggcgtcttgctgcccaggccgcgcggggcgccggcctcggtggcgttcgcctggttcgggcgcggcgcgcggccgtcggttgcggtgctccgtgcgttcgtcatgatacgtacgcccccttgtctgccgacgagacgagcttcgcgtacttcgcgagcacgccgtggtcgtgcttcggcgccggcggccgccaggccgcgcgacggcgttccagttcggcgtcgtccacgcccagcgtgagcgcgccgccttcgatatcgaccgtcaccgggtcgccttcctcgatgagcgcgatggggccgccggccgccgcctcggggctcacgtgccccacggccgggcccttcgtggcgcccgagaagcgcccgtcggtgatcagagccacgctggtggacagacccatccccacgatggaggacgtgggcgtcagcatctcgcgcatgcccgggccgcccttggggccctcgtagcggatgaccaccacgtcgcccgccgcgatcttgccggcgttgatggccgcgcaggcctcctcctcgctgtcgaagcagcgcgcggggccggtgtggacgagcatggacggatcgacggccgacttcttcacgatggcgccgtcgggcgcgatgttgccgtgcagcaccttgagcgcgcctgacggggagaaggggttgtcgtgcgcgcggcacacctcgccgtcagccggtttcgtgcaggcctgcaggtactcgtcgagcgtgcccatgcacgtgacggcgctgcggtcgagcaggtcgagctctgccagctcgtgcatgaccacgggcacgcccccgacctcgtacaggtcggacagcgggcgcgggccggagggctgcagcttcacgaggtgcggcgtgcgcgcgctcgcggcgtcccagtcgtccatcgtgatggggtgtcccgcctcgcgcgcgatggccgtgaggtgcagcaccgtgttcgtggagccgccgaaggccatgtcgcattccatggcgttgtgcaaggcggcagcactcacgatgtcgcgcgcgcagatgcccttctccagcagctccatcaccttcatgcccgcatgcttcgccaagcggatgcgctcggagtacaccgcgggcacggtgccgttgccgggaagcgcgatgcccagggcctcgcacaggcagttcatggagttcgccgtgaacatgcccgaacagctgccgcaggtggggcacgcggtgtcctcgtagtacttgagctcggcctcggacatgtcgccgttcatcacctgcgccgcgccgtcgaacagcgtgttgaggtcggtggtgggcccgcacccgcccggctgcttgccgggaagcatggggccgcccgacacgaacaccgtggggatgttcacgcgcagcgcgcccagcagcatgcccggcacgatcttgtcgcagttcgggatgcacacgagcgcgtcgaaggcatggccctgcaccgcgcattccagcgagtcggcgatggcttcgcgcgacacgagcgagtagtgcatgccgtcgtggttcatggcgatgccgtcgcacacgccgatggtggatatctcgaacggcacgccgccggccatgtagatgcccgccttcacggcttcggcgatcttgtcgaggttgttgtggccggggatgatgtcgttgcgggagttgaagacggcgacgagcggccgctccatctcctcgtcggtgatgccgtcggccttgagcaggctgcggtgcggggcgcgcgccgtgccgcaccgcacggcatcgctgcgtagctgcatgtccgatcccttccttcctggcgttgccggtttcgtggcataaaaaaatcccgttgcaagcaagctgcaccaggacctcagaaggaagggagatgcgcccggctgcacgcatccctgcgcgccgcggtcgctctcgatcggactgataacggagtcgccggttcagcctacttgccccggctgcacgcggaggtcgtccgctgcgtgccgtcgcgttcgagccgaactgctcggaggtggcgttcaggccgcccaccgccggctcgcagcatccgccggctctctgaagatgggttcgtccctactgtcctcgtcaacgcatttcgtctatgaacttgttgcgggtaagtatactccagcttcacgacgtcgcaagtaaaactttgacgatcgaagcgattgcgcggtaaatccacatggaggcggtggggattgaggagacgggggttcggggcgccggaggagctgcgaggcgccgcgaggtgccggaggctcccgctaggcgaggtgctggtagcccctccccgcggagcggttgggcgaaacgtcgcggagcgccggaaacccctcctcgcgacagctccagctcctggcggctgccgtccccgtaggtcgcgtcgtttcgggcctgcacctgccaccagccggtgatgccgggcttcgcggagaggagctcgcccgcatcgtcgccgtaggccgcgagctcctcctcgacgacagggcgcgggccgatcacgctcatcccttttgtcaagacgaaaaaacaagattacctgcagaaatgctccggctagatagctgaactatctgtttcctggagtttgaacctccagacttttgcggctcattccgaccatcatcgacgatgaaccagctccgaaaagctgccttcaaatcggatagcaaatcgtcccattggggcagattcccaatgggacgattcttcgcatcagcgtcggaacatacgcaaacctagcgatttagcgaaacggcaaatctaaataaatcgcgaggctttaaagcatcaacgagcaacaccggcttagctcgcagctaaggatgcatgtctcaaccgccgctataattgaagtggataacgaaatggcatagcgcattggaggcatatggcaaagaagcatccgccacaggcacaaacgccgaagctggtcgctagacgggcatatcgcttatgcatcagcggcaccacggtctacgccgcgcatgcgcatcggtgttgaacgcaaaaacgcgcccctaagctgtagactcttccaacttgcgaagtaaaatgcgaaacgtatgcaacgaaccaaaggagaccgcttggaagagacgcgcttcgaaatcaggataccgtgcgacgacgacggcttcatcctgctgcgatgcccgcactgcggcgaactgttcaagctcaccgccgaggatatggagtccgacgaaaccctggatacctattgcccttcctgcggcctgtgcgccaacaacttcctcacgcaagacgtcatcgaccttgctctcgcgaaaacaagcaactacgctatggacgcgattgcccaacagctccaagcctttgcaaagaagaacagcggcggcctcgttcgattcgaggtcaaagctaatcgcgaaagggaaccagagccaccaatcagggcggcgattgaagccctgcagatcgtaacctgccatgattgcggacgggaagccaaggtctcaccggccctcgccatgtcagcttacacgtgcccgctctgcggaataggacaattcaatgaacgatagcaagacgacgctgaagaagctcctcttcgagcacaactcggaagcaaacgcccttttacacgcaaactacaacgagctggaaacggcaatcacgcgatacctccgtttcatcgaaggcgagcccatcaccaaggcattcatcgacgatattgtggcaaaccatacgccagatgggttcgacgcaatcgaaatgcttggaagcgcctcgagaaacgggcattcggcgctcggcccattcccgccagagtacaaaagcgaatcagccgtcgtctaccttctgctaagggcaatggtggacgagcatgcctgcaacattagattcctgctctatggctatgcgcacggctcgaagaagttcgatgatatggcgaaaaacttcctcgaagaagtcgcccggcgcttggtggcgggcgttaaccgcacgctcacattgagtgggagtaaaaaggcctttgagctgggtgtttgccaactatcccatctagtgtgttttggtctcatctagtagtaggtaacgtacaaaccaccagacagttttggtgagtaaaattttcgagaagctcctgaaatcatcgatttcgggggcttccattttgcttattgacctgctcatttactccctagttgacttcatttcgtacacagagtgcgactagttcgcacgagatgctaaaagatgctaatagatggacggagctgacaagcgtttttatagcgttttgcgtccaaggcgccccgattcccaaaactggaactcagtttgaactcagcgcccattttcgaggctgattttcgcaaaagcgcaggtcgcaggtggggagtaaatttttcgggaaaacgctgccgggagtgccgaaacccgtcccaaaacccgaatcttagcgctggatttactcaccgggtagcgtcccgaaagttggtgtatcaatccgtttctggagggcgggcgaagcctgcccgagaaaaacggacatcgtctagaatcgtcaatcaccacaaaagacagattcgaaggaaggcgatgcccgctatggacactctactattcaacgaccccgaagtgaaggggctcgcgttcgcgatcctcgaggaatgcaccgacctgcaggccttcgggcgcaggatgctcgagctcctggcgaacgccgcgatgtcggcgaaggccgacgaggcgtgcaacgccccctacggggagcgcgacgaggggcgcgtcaactcgcgcaacggctaccgggagcgggggctctcgaccgccgcgggcgacgtcaccctcaagattccgaagctgcgccgaggctcgttcttccccgaggacctgatcgagcgctactgcagggtggaccgggcgctcgtcgcggcggtggccgagatgtacgtcatggggatatcgacgcgcaaggtggaggccgtcgcgggcgagctcggcgtgaggtcgatgtcgaagtcgcaggtgtcgcgcctgtgcgagtgcctggacgccgaggtggacgcgttcaggaggcagcgcttcgacggggtgcgcttcgcctacctgtggctcgacgccacctacgtgaagtgccgcgtggaggggcgctcggcgtcccaggccgtcgtgaccgcgatcgggctcgacgacacgggccacaagcgcttcgtcggcgtggactgcgtggacacggagagccacgccgggtggaaggcgttcctctccggcctgagggcgcgcggcgtcgacggcgtgcgcctcgtcgtctcggacgcccacgaagggctcgcgaaggcgatagccgagacgttccaaggagcggcctggcagcgctgcgtcacgcacctcatgcgcaacgtggcgggccgcatccacaggaaggacgaccagagaaaggcgcgcgaggccatgaaggccgtcttcgcgcagaagagccccgtcctcgtgcgggcgtgctaccaagaggcgaccgaggaggtgctgaagatctcgagggcggccggaaacgtgctcttggaggccgaggaggcggcgctcgcctacctggcgttcccggccacgcaccgcaccaagatccgcaccaacaacgtccaggagagggccaaccgcgagatcaagcgcaggacgcgcgtcgtgcaggggttcccctcgcgcgagtcgctcatccgcctggtgggagcggcgctcatcgaggccgacgaggagtggtcggcgcgctgcgtcatctccaggccctcgctcgcgcacgcctggaaggcccaggagcgcgaggcccccggcgaggccgaggtgctcgccgcccgcgaggcggcgcgcaagatcatagggagcgccattgacccgaaggaggacgaaggctaagattcacctcgcaagggtgccggcgattctccggcgatggccctgatacaccacgattcgggacgcggcctactcaccgcccccgtcccaaaaacccgccttcaggagttttgggacgggtttcggcactggggagtaaatgaaggaaacgaaaaacgaggtcccgcaggggcctcgtgattgacgtgcgagcggtgctgcctagcccctgaaggacgccttccaggcctcgtactcctcttctgagacctcgccggcctccagccgcccacgcattcgcgcccacgccctcagggcctgggagagcttctgggagccttccacctttgggtcgacggtgatcccgatgccgtcttcggtctcgacgggcctgaagccgatttcgccctccagcctgaagaccatctcgagcgcgccgcgcgcgcccacgaggccggtatccgcgagggactccggagcgacgtcgagcgccctggcgatcgcctccagctgtgactcgctcggcgtgcgcaggccgagctcgtagttgcggatggctgactcggtgacgccgacctcctccgcgaggcccctctgggtgtagccccccgccttcctatagcgcctaatgcgctcgccgacgcccatcccgcctccgtctctgagcccgccgttccatgggacgaattctacagcagcacgcttccgtgcgcaatcattgacagcacggtatcgtgctgatatattccaaggatgaaacagcacagtatcgtgctctatgggaggaggacggcatgtcggtgaggcgggaggacaacgggacgtggacctcgcagttctggttccgcgactacgacgggaacaggcgccacaggacgaagcgcggctttgccaccgaggaggcggccctcgagtgggaggaggagggcaggctcgaggccgaggggtcggtcagctccaccttcgccgccttcttcgaggtgtacaagaaggacatgaagccccgcctgcgcgagagcacgtggatcggcaaggagtacatggtccgcgacaagctgttgccgaccttcgggcagatgcgcatggacgagatagagtccgtggacgtcatccggtggcagaacaagctgatggccatgcgcaacgcccacggcgaaccctactcgcccacgtacctgcgcaccatcaacaaccagctcacggcgatcttcaaccacgccgtgcgcttctacggcctgcgcaggagcccgtgttcgcgcacggcgaagatggggacgaacaaggcgggcggcatgctcttctggacgaaggacgagtacctcaggttcgcagacgcgatcgccgacaagcccgacagcttctgcgcgttcgagatcctctactggtgcggcctgcgcgtcggggagatgctcgccctcacgccagacgacatcgacttcgggagggccgtcgtctccgtcaccaaatcctatcaacgcatcaaaggccgcgacgtcgtcaccgaccccaagacgcccaagtccgtgcgcaccgtggcgatgcccggcttcctcgcagacgagctctcgtactggctccaggggcatcccgtggcgcacgacgagcgcatgtttccgttcaccaaggaccgcatgcaccacgagatgacgaggggctgcaaggagtcgggcgtgaagcgcatccgcatccacgacctgcgccacagccacgtgtccctcctcatcgacatgggctattccgccgtggccatcgccgatcgcctcggccacgagagcaccgacgtcacgttcaggtacgcgcacctcttccccgacaagcagggggagatcgcacgcgcgctcgacgagggagggagggactgatgccctgccccaacgaccgaagggcgaggagcgttaccgttgcgttccgcatgacgccggcgcagagccggtggctcgacgaggtggtcgcggagtccggcatgaccaaacaggacttcatcatggcccgcctgcgcgaggacggcatcaccgtggtgccgaacaggcagatcttcctggccctgcgagaccacatggcagacgtgcttcgggagctcaggcgaatcgaccccggctgcggggtcggcagcgagctcatggaggccatcacccggctcacgcgcgagttcaccgagctgcgcggtgaggaaaccgccgatgtcgtgacggagaggttcgagggcatcatcggattggagcgccgctagcgcccagcttgcacgctgatgacgcgctcgccccgtttcggcaatcgagccatgccggctgtgttgctcccaggccgtcgatggaacccctccgccccttcagctcgttgtgctccatgccccgagcgcgcttccaggcctcctgggcaaaacggcacactccctgggccgctccttggactttcgcagactcgtcgaggacccctgcggtcgcaagggccgcaaaaacttttcgagtggtttcccaagtccgatgctcgaaaactcgggcccctaagggttttgctttcccccttgcagcctccgcgaaccccgacggcatgcgagccacaaggtccgccacgggggcgggccggaacccaaggaggccgaccatggaagccatcgacaccaaggcaatgaagggcatcaggagctatctcgagcgcaggggtttcgaaatcctcgaagaggagtgggcgcacgacggcgacatcatcgactttatcgccagcgaggagggcgacctggtcttcatcagctgccagctccgtcagaacagcggcgagggattccccgaggaagctctcgatcgcgactccctcgagcggctggcggcggcctacctcgccgaacacctcgacattgccgactgcacggtcaggttcgacgtcgtgagcatgctgattttcggcaacgacagggctcttctccgccaccatcgcaacgcgctctgcaggctctagacgcgaagcgcccttggagcctcggctccaagggcgctcgctggcgcaattcggccgggagcttcggctcccggctctctgaaagcgtgcaaacgcccggaagatcttctcacgtcatcggaatggtattcttttatccagcaagacaagatgtgcccttcaaacgcctccgggtgcttgaagggcacgcggaggcaggcggcattgctgcgcaaggagggagtgaagccgaatgaaccacagaatcgaggaaatttcatctagtcttgcgggagtcgagcacggcttcaaggaaatcgagaggtgtgctgccgccgacttcgcgtccagagacgcctcggatgtcgcagagttggcgcggtcggcaggagaatcgaaaaccgtccaggtaaggatgtacgggacgttcctactcggctacctcgcggcgcatgatgagcatgccctgcgtatcctcaaggatattgtctctcgtgacgaggactggagagtccaggagattctcgccaagtccttcgatcggtattgtcgcgacagaggctacgaggaggcccttcccataatcgacgagtggctgtcctcggacgagcccaacgtgaggcgggcggtgacggagggcctgagaatctggacgggcagagactacttcagggagcaccccgaggaggccgttcgccggctgttcgcgctcagggaggacgcgagcgactacgtcaggaagtccgttggcaacgccctgagggatatcagcaagaggcacccggacctgatcgccgcagagctggcctcgtgggagctggactcgaaagaggtgcgacaggtccacaagctggcatccaggcttctcgcatgatgaaccatgcaaacggccgccggaagacgggacgccagccgctctcatcgaagaggcttctgagaatccgacgctcttccgacaggctgggcagctcatgttcaacaagcccgtctccgcaaatgaaacctagatggctttcttgagcgcaagacgcctgtagtgctcgccaagcatggtcagcctgcagcccttgccttccatggccgcgttccacatgtgctcggcgtcgacgggaacgagcaagttgagccggttgtacctctgcagaattgcgaacactttgttgttggcctcgtcgcttggtggcatgtcgggggtcctgccctcgttccgaggctcgaacgacgggtcgagctggaagacatgcccctcatcgggaaagaactccggaatgcgcctcaggtcctctatcggtatcggaggggtgaccttgcgaagcgagacgaagctctccgtgttggtcttgaaaaccggcctctgctcccatgcccctagtgactggtcgatgtgggcgtaaacgcttccgggggtgatgtcgcccgtgaggttcgctgccgcaccttccagtgcgtcgacaagcagaccggtgaagacaccgtgcacaccgacctcaagggccgtctcgtttctcctcgaggcagtgagtatcgttacgccgtcagcgatggccgcatggctttcgagactcgggatatcgcccgccgcccccgaaaagcagctgtcaaggatgatgaccttgttcctagccggagagctgtttgcgtaatccactagagtccgaagcgacaggccgtcgtctcctcgcttgcattcggacgtgattacgtaaccgcccgtcgattcgacatagccatggccggagaagtagagaagggctatctccgcattcgagctgaagagcctctcgacccgatccttcaaatcccctctcgtcaccgattcggcgtcctccgcaaggagcagcttcgtatcgaagttcttggtcctgccctcgtcgccattcgcctcaagcaaagaattgaccgctttagcgtcagcaacacatcctgatagcgacttcacatgctcgtaatggttgatgccgacgacgagggccatcctgtttccgctcacggccatcacaggctgtctatgaagtcttcgatggagcgccacgtccaagaaacggtccgaacccccgcgatgttggtctggtcgtccttgtaggcccatattcccagcacctgcttcccctcttcgcgggcgcactgtatctcccacttctggccgcttgaccgaagcgaattgtcgcttatcaaggcgatgacgccatccgaccttcttatgcgcgtcctcaccttctccttccatgcggacgcataggcctctttgacggacatgtccacgtattcgaagggtgagcgggtattaagggactggcccttgagaaagtccctctgcctttcgtcttccattgcgaatgcgacgaaaatggtttttcttcccatggcttacttcttcccgaaactggcatagatggtatgtatcaatcactttattatactctctgcgtctatgaaaaaagctgttcagattccttcccttatgtcaataacagcacaatatcgtgctgtttatggtacaatcccattggcagcaagcttcctatgttgtgcgcacaagcgcccaacatagagctcgatcggaggcgggccaacttccacttccctccaacagctttggtggctgatggagagaaggcccgctccgataggcagctgccggccttgcggccgcagctttgcgggggatgccccgcgcccctagatggcaagcgccttccacattcgcttgcccggatgcaaaggaacagagatgagcgaatactgccagcacatcaacgtgcgggtcacgcccgacgaaaagagccgtgcaatcaaccttgccaagagcaagggcctcagcgtctcccagctcatgcgggttctgatccagctccccgccgagtgcgctgacgccgatgggattcaaaccgcggtgatcatcgaccgaagctccgttccgaagctcgagcgtgagatgcgccgctggggacaccactacaaccaggcggtgcatgcgttgaaccggctcgcctactatgccgatcgcggaaccctcaagaccgaggaggcccatcagctcctgcgaagggcagaaggcaatctggaagatctcaacgtcgcggtcgtgaaactgcgggacgacctcgagaacattgcccaacataccgtcgtcagtctctaacgatgccgtacgtgaagtgcatatcagggcacacgagcgctcgatatatccagagatatctcgagaagggcggccgcgccctcgctaccgatttcgtgaacatcgacgtgcccgtgaagggggttcgcgacggactggaggattacgagcccttcgactggtggcgcgagatggaccggacgcgcagcgacttcggcaacgacaccccatggaacggccagcgcgcacgtacctggaagcactacatcctctccccaaatcccgacgatgacatcgacctcggcatgcttcgacgcctggcggttgcctgggcgcgggagaacttcaacgactacgaagtcgcaatcgtctatcacgatgacaacgccaacaagattccgcacgctcatgtgatggtgaacaacaccaaccttttaaccggctacaggttgcaggagcccgatccccgcgcggtgaagcgctctatccagaagctcgccaagggaatggggctttcctggttcgaggacgcaccccgccccgaaggcacgaagcgaaagcgtagcgtcgtctcgaaacaacgggtgcatgtcggtcgtgcggagagggagctcgagggcaagggagagtattcgtgggtcggggacatccgcgcgagggtgtccatcgcgcggatgatcgcccgcaacgaggatgagttcaaaagcgtcctgaaggccatgggcctggacgtcaaagacaactcggcaaaggctgtgaggcgggattggatctattcgttcgatgaccgccccaccctccgcgtcagcggagagaagatggggctctcattcggcaaggaacacctcacgcgtaggttcgcatcgggctcgatggggcgcctcgcggacgccaccgaacgggaggtgttcagaatcgcatccgaagcatataaggtcggctatatcgcggagttgaggaagctatcggatgcggtgtccgtctgcgaggcgattggcgcgcagagcatcgacgacttcgttgcggcagagagccggctcccgcgcggcctcgatcctgccaagctcgccgcagcggtcgaatacatgaccgagaaagagctgctgcccaccagccatatgcctgcaatacaagactctcgccgaaacgcccagcagaagccctgggagaagaatcaacccagctggatgaaggataggaaatcgaacgagaggcgccaggagcagccctctcgaagccagtacggcggcaatcgagacagggggaacagggatgctcgttaagacctattacagcaccggccacttcgacgtcttcgacacggcgaccctcgtggacggttcgatattcaaaggaaacgcgctcacgaactacgcgctcgagatctcggatgcacgcgagggaaaggcgctctggctcgactgctactactacgagacagacaaggcgtaccgggacgacttgaacccgcatgggctgccggtcgcgaggcgcagggacggctggtctttcgtcatcgccgacaagtccgacctggaaacgctgctcaaggtgagcgtcgacggcgaagacgtgctcgtccggcaaggagacgagttcgttgacgccttgaagctgaaggtcgcctcagatgtcgcctacggcgtcaaccccgcaacggtctcgacgcacgactactaccaagtcgccgcgcaggaccaggacccttgcgagcggatcgggtacacgcagtcggcctacgagcgcgtcgccctggcccaacgcagggccgcgccgcccgacgaaagacaaggctccttggaaggaggcacgaatgaagaccgtttttcgattcgctaaatggctgtttcgagctgtattcagatggatgtgattcagcggagcggccatcccaaaaatgcttggacagcatcatttagagacgttgatattgggacgactttcgggaccgtccgccccgcccgtttcggcggtttctcggagtggttgcgggctttcctaaaacggacgttattgagacagggaggaggagcgaagtgagattcggttatgcgcgagtatcgaccgaggaccagaggctcgaccgccaggtcgacgccctcgagaaggttggatgcgaacgcatctacctcgagaaggcgtcaggcgcgaaggcaggcaggcccgagctcgagaagttgctctccgtcctccgcgacggggacgaggtcgtcgtggccaagctcgaccgcatctcgaggtccaccaggcacctgatcgagctcaccgaaaagttcagcgagataggggtggacttcatctccctgaacgactcgatcgacacgaccacgccgatgggccggttcttcttccgcgtggtggcctcgatcgccgagctcgagggggacatgatcgtcgagcggacgaaggacgggctgtctgccgcacgcgcgcggggccatggcggcggacgcccgaaggcatccgccgaggcggtttccaaggcgaggcgcatgcacgagtcgggcaagttctccgtctctgagatcacaggggcgaccggcatcagcaagagcacgctgtaccgaaaccttgcccacgaagccgacgagccgccgtccgttgggacggaggccgtacaatgtgcaatcatggatgggagtgaaaatggcaagagatgatatcggcatccgggcgaggaagcccaagctcaccgtcgacgagcagatcgagcacctgaagtccaagggcgtgacgttcgacctttgcccggaggaggacgcccgcgagacgctctccgacaagacgtactacttcaagctcgcggcctaccgcgcactcttcgacaggcgcgtcggtggagaacacgacggcgagtacgtggggctcgacttcgggcacctgcaggacctcgcggccatcgaccacatgctgcgctacacgctgctgccgatgaccctggacatcgagcacttcgccaaggccaagctcatgcgcgaggtcaccgagcgggcggacgaggacggctactccatcgtcgtggactatctggccagcctctcgaagaagagcctggacatccgcaatggtgagataaggcgcctcgagaacgacaggtacagcggcaaccttgtccgcaggtacgacggtgcctatcccgcatgggtgttcgtcgagcttatctcgttcggcgggttcatcgacttctaccgcttttgcgccctcaaatgggacgacagaggaatgcggaaagagcactacctgctgaagcaggtcaaggccgtcagaaacgcctgcgctcactcgacggctatcgtcaacggcttcgcgcccgggacacccagcgatgtccgaaccccgaacgaggtcgcccgtgcgcttgcggaaatcggcctgaacaagcgggctaggcattcgaaaatgtcgaactcaagggttcagcagataacgatgacggccttcgcctacagggagctcgtcaagggaacccacagcagggagatgtgccgctcgctggtggacgccttcatcgccaggtcggaggagcgttcggactggtatgcccgatcggactatttccgttccgccctggtcttcttgaacagggtgtttgacagatggatctaagcggtccataatgtatccagctaaaaaaccttagggttttgcggggcggggttgcgaaagcggtcctgccctagttttttgtccacgaacagcgacgggtgtgcctggtccgtctttgctgctctctggcctatagaaacggaaacgcgccctggattgctccagggcgcgcactttcacatctcgaggttctcgtattcccgttctgcagtggatcctgctcggatgcaggcgcacccgagcaaggtcgagagcatcgcgaggaacccaaacgagaacaacagccccttcatgagcatcaggcctcgactccactgtcatcagatgccgctgaatccaagtcattggaagaacgacagcgcgtcaggaccaatgcggtcgcaccgcatacggcggaggcaaccaacaaggcaatgggcaggacgggaagatcgtctccggtcttggggagactccccttgcccgactcgctaggggttggctcgggtgaatcgggagacgtcagcttcacggtctgcccctcgtcgtcgatgtctgcgtgggcggcaacctcgacgtctccgctcataaggtcttcgaacacgacgacgtcatgcccggaaagctcgatgccgttgaacttgaacgtgaccgtctccgacccgttagcgctgccgggcgtgaaggcgacttcggaaacgagctccttgccgtcgatgacgaccgcctcgccggtctccttgtccatcagcttgccggcgagcttgtgctccttgccgggcgtgaggttcgtatacgtcacgacgtcgttgatggtcacctctccgtcggcggcggcctcgtggtctccgtcgtccgcatcggtcgcggtggtgccgatcttgggcccctcggagttcacgagcgttccgaggtcgatcttgacggagtccttgtagacagtgacgtcgaacgcggggatcaggtccctgtctgcgttggaatcgcatcgatgctcttcgatggtgtaggtgtcgtagatgagcgcgcccttgtcgtcgtcgggctcggaggagccgaaccagattcccgattcggaggtgcctgcgttggttttgaaggtgtgcgcgttccagctagaagccgtcgaggcgtagccgttcgcgtcggtcacgatcgcgtggctctcgccggtcgtcttgctcgtgatcttgaaggggacgttgccgaggcggctgtagtcgcctgagcccaccttcacgagctcaaggtcgccgcgcttcacctgttcggtgaactcgtcagagggggtcagttcgaacacggcgattgtctggtcggtcatgtcggcgctcaccgtgagctcatgggtcttggtgtcggggagatagccttcgggggcgctggtttccttcaccgtgatcttgcccagaggaatctcttcgaatacgatctgcgagcctccggtggttccctcgacggtcttggtggttccgtcgtatgtgtaggtcgcctcgtaggtcgcgccgtcaagtgatgctccaccctgaggcgtggcctccagggtttcgctgtcctgcttcacgacggtgagcttcacggtgatgggctggtcggtcgcatcgacgctggcatccgcgcccttgacggtgacggtgaacacctcgtcagaaagctcgtagcccgctggtgcggagatctccttcacaatgtacgtaccgttcggaagcttgtctgctgtgcttccgtgcccgcttgcgtccgtctcgaacttggtcacgagcgagccgtctttgtagactccatacacggcgccagccagcgagtactgggagttgcccttggtcaccttgacgtcgccggacgacttgtcgagtgtgacgtacccgccctcggcgaggccccggtagaccttgaagctcgcatacgtcttgccgtgcccgccatcgatgtcccacatgtagtcgaagcggcagttgcccgtgccgaacccctcgtaccaggcgtggtagatggtcttgtcctcgcccgcgataccgcagtgcacggtggcacccgacgcgttccagaacacgatgacgtcgcccggcttcacgactcctgcatcgcaggccgcgttgtagtcctcggccgaatctcccgagaggacctcgtagtcggagcaatacgaggcgatcgcatccgtgcccgagtcgccccatgtcccaccaggccagtcagtgccgtagatgtcgtgcatgacgaaggacacgaagccggagcagtcccaaccgctcgtgctcctgcctgcccatacataggggacgcccatataggactcgatttcgggcttcgcctcgtcccaggtgagctgcgagatgctttcggtcgccgcgtaggccttctcagcctggagcgtcagcgtcgggaccatcgtcgagatgacaagcgccacggccatcgcgacgcgcagtgcgcgcctcctcgcgctcgtcgctttcttgattgattccatcctcaccgcctcctaacgctgctcgcgcgaggctgcgggaatggcttctccgccccgctccatcgcccctgaggcgccacgggcatgctccgccctctggtcgagtccgcgttcgtcgcgcccgtgctcttccgcccaagctcggcgcgactcggcgagggcgtccttgatctgctggggcatcaccttcacggtgtccttctggcgccttcccgcctcgtccagcacagggtttccctctgggtccaagatcgacttctgcagccagacctcgcgatccgccagcattggcacgtcgcgccatgctgcccccttgtacttcgattcgttcacgtagagggggctgaattcgtagcctcccatgtcctggccgtcaatgatggttcccgaagggatgcggacctggttgaacgtcctttgctctcccgtagtcttgtccgtgtaggggatgccctcgcgcacgaaattctcgtggaacgagaggtagacggtcttcttctgctcgatgtctgccatttctttctcctttgcatcggtgttcgttgtttgacgcgtgtggaagtgcgcgtcgtcgttttcttctagcggatcagggacccatgtctcctcctcccttctgggttagccgcccatgatgtcacgcgcccagctgccgctcttcacgagcgagaggatgagcaggatgcacatggccaggtattggagcgcgtacgagaggccgccgattatcgagtcgacaaccggcactccggcgcttgcggcgttgagtccgcccaggactatcgggaagctgacgagaagcacgaggatgatgatgccggcgaggcagacggcagcgaagttcttcaggtatccgacgcccatctgcctggtctcgtcgagcgccatgagggacagcggaatcggcgagaacgcggccatgatgtagatctggatcgcccgggcccaggtgacgacgagggcgactacgtatgcgacgatcacgaccagccagctgataagcgcgacggccaacatcgcgagcagggccgccacgtcgttgtcggtggtggtgatggacacggtggtgaggtctatctgggagcccgcgccgaacagtccggcaacgcggtcgatcgccagtttcgctacctcgtatatcgcctgcatgatggcaaagctgttctgcacgaggaaaaggaacacagcgaagaacacgaggaggaatatgacctctttgacccccggcatcgccgcgttcccgtccatcctctggctaatcttgatgagctggacagtgaacacaaaagagaggacgccgcagccgatgggaagtatcgccacctcccaaaccccgtggacgatgtcatacatggtgacggaaccggcgctcccgagcatctgggtgaagttcgccgagagcacgccgtcggtcccgatcgacttgagcatgtcgacctggctgttgaagatccagttgcacgtgtcgcgcaacaacccgcacaaccagtcattgatgtcgtctgcaatagcggcgaaggcgaaatcgggcatgccgaacaggacggtagcgaacaggagggttccagcaaatgcataggcgaatctgggatcggtgaacgtattcttgactgatcgcatggcccacctacccagccaccgtgaagacgccgtccttgtaggccacctggaggatcgtcgacgctgtgtcgttgcagtggtaggtggcggatacgctaccgccttcgatgtccaggtatacctcgccatcgaagctcactttcgtagcggtaggcacgtgagctcggcagtattctgcgaccgcggaggcaagctggtcggtcttgccgtcaatgagcgtcgtgtacggctcgctcaccccgtcgatcgctacgggctccttgatcacggaaccctgcacataggatgtcgcgttctggaatgcgtcgcaggagaccctgtaggacccctcgccacccgcgatggaaatggtggcggtaatctcggaggaggagccatctcgtgtcatcttgacgtcgacggagcttgtcgttgtcgaggtgacttcgaaggcggtgagcctcacgctcttgccatcggactcaacgaacgtgctgtccttgaacacgatcgtcttcgacgggtcaccgtcgacctgccatgcatgcgattcgagtgtcacgagcgcggcgaggtccttgttctctccgggctcttcggccatgtcctgctcgattaccgtcgactcatcctgcctggcttcgtcttgcgcctttggcaggctgcacctgacgacggagctcgcgatgaggatgacgaccgcgccgatggcggcggcgagcatgaccttgttctttccgtccattgcctgtctccttcctagtagcggaccgcgcaggtgaaatacgagatcccgctggccttcctgcacacgtcccccgcgtgcggctcgtgtatgtactcgtcgccgcctatgtagatggcgacgtgaccgggcctccagaggatgtctccgggcctcgcctccgaaaggggcaccttcctgccgccggatgcctggtcctccgagtagcgggggatggcgattcccgcctgggcgtagcagtactgcgtgaggcccgagcagtcgaggcccgcgttcggggccgagccgccccacacgtacgggactccgagctggctgtatgccgcttggacgatggcgttgccgtcggcggtgccgcatctgaagtcctcgagcgacatcgtgtcgaacctccgaagcccgtatgcgtccatcacggacttgaggctgatcacgtattcggacgaggtggcgtagccggcctccttcaggccctcggccatcttgtcggagtcatgctccgagatcgcctggcggatgagctcgttgtttgcgtagcggctgttctgaagcaggaccctggacctgaaggttatgcagtccctcatgctcttgaagctcgtgaagtcggccatgatggtcacggtttgcccgccgtattcctcgttggttggccacgacgacttgccggccacctcgggcgcgcctgcgaagccggaggcccatttgatcccgaacaggttgttgtcctgcgtggccagaccggaaaggcggtcgccttgcccgctctcgacgacgatctgggcgagcgtgcacccggctgggtgcccgtaggtctcctggcattcgagggcggcctcgaccatctcggttgtgatgtaggggggaagtcccgacacggcctgcttcgaccgctcgttttcccagaacccgaagagcgagctgacgagctgcgatgcgaggagcgcggcgaggacgaagcagaggatgccggcgaggatgccggcgataggggctgctgcagatgagacagccgctgcgatgcctttgcccgttcccgagccgatcgccttcgcggcagccgccgcctgtttcgcctctgcttgcgcctgccgcgccttgatccaggtgcgcctcgattggattttcttgcgagcttcggctgcggtgcgctttcccttttccctcttggcggccccgctaggggatagggacgacttcctggacttcaccttgtcgtaggcgccccgccccgccctcgcggcgcccttcgcgtcgcgacgcatgtcggcgacaccttctagctcgtcggaatcgtccagctgctccgctgcttcgtcggcgagcatcgcctttacgtggaatcggcgttgggtcgactcgttggcctcggtcgcttggatatcgtgagcggctgcggcagtgctcttggccgttcgcctttggggtccggcggtcgtttcctttatcttgccggaccgctcctcaccgttgcgtacgatgcccgcagacaccgcgtttgtcttgccggactttgcgaccagcgccgcatccgtctcgggacgcgcgaggtcggcggccgtcgtcggctcatgcgtttcgaaggagtcgcttctggctacgcgggacatcacgcaccgtttttcctgagcctcgcccgtgcggcgaactcggacgccttcttcatagcggcgatttcctcgggcttcgtgttgaacaggtcgtagagctcgcccttggggaaatcgtctttgataggtatgcgcgcccctcccgcgacgagcaggccttcgcctgccttgatggactcgtcgagatagcccgcttcctgcgtcgacaggtcgaggagctcggcccatgccttgcggtccagaggtgactgcttgtgcagcaggatgaagtcggagttgagcaccatgttgcgagcctcctcgtgatcgagcatgtacacgctgttctgcgtgatgcccgtgcagacgaggttgaacttgcgcccctcggcccagaacttcgagaagtagctgatgattgccgggtgcccgaacagggattgcacctcgtcgatgtagagccaggtggtgacgccgcgttcgaagttgtagtacatgcggttccggacggtttcgagtacggcgatgatgccgaacgccctcatgttctcggacaggtccttgaagtcgacgttgatgattctcttctcgaaggtaacgttgctgtcgtggttgaagaaggacaacgcgcccctcacgtagcgctcgtagcgcagtgcgatgtttgatgcctcgtgttcgggctgctcgcgcaggatgtcgtagaagtctccgagaaggggcagcctgccctcctcgccgcattgctcgtaggccagctcaacgcatcggctgatgatcgacttgtcggcctcggggagtccctggctgccttccgccatggtcgcgctcgacagcgccaggaatgcgtcgatcttgaacgccatctgggatgccgttgactggtgggcgacatctgaaaggtcgaaggggttgaggtgggtgcccgcgtccggcgcgaacctgatcgactcgcctccgttgccggtcaccaccgggctgtattcgcctgccgggtcgagaatgatgatctcgtcgtccaggtacgccaggatagtgttctcgatctcccttttcaccgagaacgacttgccggagcccggcttgcccgatacgaaccccatggggctcgcgagcgccttgcggttgcacagcaccaggttcgacgactgcttgttctggccgtagtaccctccgccgtcttgggcgagctcctgagtggcgaagggcatctggatggacacctgagcggtcgtcatcatgcgggacacctccacgtggttgtgcccgagcgggaggatggagttcatgccctcgcgctggcggtaatcgagggcgtcggcctcgatcgagtgctgacgcgcggtcgcaacgatctggtcgacctgatcgtccagttccttcctggtcgccgcgtaggtgtaaacgagtcccgtgtagacgaacagcctctggttgcggttctggaggtggtcgagaaggtcctctgcctcctctttcgagtacttgagctctgagggcaggatctggaagtcgtaccccttcttcaccgcagacatctgctcgtcgatgatctccttgtccatccaggcgagtctcgtcttcacgaaggcgaccgccttcgccttgtcgatggcctggacgtgaatggtcacgttgagcggcatcgggaggtcgatgatgtcggccaggcacctgtccgtgagctcggatccgaagcgatgcagcgaaaggacctggcaccacatgccatcggatttgaagcaggcgccagagccctccggcttgaagtcgagcgtcgaggggcaaatgaaatccttcgatgtgaggttcccctccgcgccaacctggtcccatgagaagtagaagggcttggctggcctgagctgcaagctgatggcgcgaaggcgctcttccctgtcgaggacacgtgagtcgctgcggatcttgcccaaggtctgcatggcatcgcttctcatgcgtgcgagcttgggcacggccgcgtcgacgctcgccgcgccggtcgagaacgtcaggtagcgctcccttacgaggttgctcacgccctctctcatcttgtcgttgaggatgcggttgtattcccgtgcgtagccggcggtgtcggggtcatcggtggagaagaacaccttcttcccgatctcggacggggggatgggcgtgttgaccacggtgagctggacgcagctttcagctccgaagtaatcgaacagctggcaccagccgctgaacacggccttcttgttcccctcgcgtgccgactggtagctgatatcgtcgaacgagatggtctggctgaacagcccgtcctcaacctggcagatgccatcctcgtacatgaggtcgaagccgatcgcgccgtagacgtcctttgcggcgtggcgcttccttctctgttccgaggtctggtcggtaagctgcttctcctggtctttcatccgccgttcgatcgaccggctgcgggacctggacttcttgggtttctcctggttgccgtcactaggcttcttgagtgggttcacgacgttccgcccccttcttcctggatttcttccttgcctttcggtctgtcttggggcacttgacctcgtcggccaccgagcccatgtgcggtgcggtcgagtaggcgagctttccgtcgcccatgacgtgctcgatgtagagcggcaggaacttctccgccttcatccccttggggcgccagaagccggcaagccagaacggcatcgagacggccatgaccggcagagtcgcatcggagacgggaatgccgagaccgaagtagacgcccgctgccgctgcgatggaggccaacagcccgcccgtaacgcaggcgagcgtcctggctgaaagcttcccgacgaccttttcctggtactcggatatgtccttgtggatggttacgctcagcatggcgcacctacgcaggcagccatgacgtgtcgagcatgccgaagtagacggccgccgcgacgatgatggcgccaccagcgatggtcgagatggcgctcgctatctgcgaaccgccctgctgctcgcggatggcgaggccgagggatacggcaccccatacgatgaggaagccgcccaggaaggtcacgcatcctgacacgagcgtgatgatctgagaaagcatgttcggttgctcctttgcatcgggggcggctcatgcgtggaagcgccgcaccgtgggtttacaattcgcctcagagcgattcgctcgctcctttgcatcgggcggcggccccctcggcggttgtggaaggcttccgagggcatggcgctttcgcgcggccgtcgcctacacgcaatcccatcacatgccgaccacctcccgctttctgccgaggtacccgacgaagtcgaaaggctcgtcgaaggcggcgcccttatgccccggatacgcctgaggccacctggggtgcttcgtgatgtcgtacttcctgtccttgagggggtctgtgccggtgatgagcacgatggccatgtctctcggcagcttggcaacctccgcgccctggataaggtcgcgttcgagggtgttccagttgcgcgtcgagctgggcatcgcgcctcggttctcgttccatgtgaccgtgtcgagcgtctgcttgcctacggtctccgatatctccttgaccgtgtcggtggactttccgccgaggaacagcgtcgtgtcgcagcagtcgatgatcgtcgcggcgtcgtccttgtaacgcgccttgagctgcgagagggattgcaggatcaccgacatcgagatgttccgcgatcggatcaccgccaccatcttctccacgtcggggagccttccgatgttcgcgaactcgtcgaacagcaggtggactggcacaggcaggctgccgccgtactcgacgagcgcacgcttgcagaggatgttcatggtctgccacatcatgatcgcgaacaggaaggagtagaggctgccggtgtcggacatgatggcgaacaccgcgcgcctgccgtctgcatcgcccagcttgtcgagctccatctcgtcgtaggagacgagctcgcgcacctgggggatggcgaagggctccatacgcgtgttgcagctcacgaggattgacttcagcgtctttcccgccgcgtccttgaacatcttgtagtgcaggaggcagaagtccgagtcgaccggcgtcgggctcccagtcgtcacccagccgaactccgagctctcggccttgtacgacttcctcgaccccttctcgtactcctcggcgcggctcatgccggtgcgcatgtagcgccgcccggtctcgacctcgttgaatatgaggtcgagcgggctcatgtagccctcgtcgttctccttcgccttcgcgagcgagagcagcgtcaccaggccggagagcgagcggtccttctctccgcagtgcttgaccaggtacccgatgagcgcgacgtagagcagcctctcggcgttctcccagaacgggtcgccggcgtgctccttgtcgcccgtggtgttgtcgatgaagcacgtgacgaactccagaatatccgcctcgtcgtgtatgtagccgagggggttgtagtgcatcgacctcttgaagtcgatggtgttgaacgagaggatctcgtacccgttcgcctcgagcatccgtcccatcctcgggagggtctcgcccttggggtcggtgacgaggaagttcgagttcatctgcatgatgttcggctcgacgtatccgcgcgtcttgcccgatcccgaaccgccgaccacgagaacgttgcggtttcgctcgtagcgcctgtcgtggtctttgcgctccatggccaggccgaagctctcggtgaagatgatgttgttcgaggggtcggacacgtcgaggaagtttcgtccctcgcgcttggttccccatttggcgcttccgtgctcctcgcctgcgcgctcgcccggacgatgcgtcagcgagtacgcccaggccgcccagacggcgcatgcggcgagcagggacgccgccagggcggcggggctcgatgagagcgggaactggctcgaaatgaagtcggggagggtttcgaaagcgctggtcaggttgcttatcgggttgcctggaagtgagaatatgcacgtcacgtaggcatttgcgagaaccgccgctgtggttgaggcgacagtcgtcgcgaccagcggcatagagccccggctcaccttgctctcgtttcctggaaccttgggtcacgcaccctctgttggggcttgtcagcctcgcgctccagggcatcggctgcctcgcgagcctcctttgccttctcttcgagcgggcgggagtctcgcttctcgtcgaggtccttcttcagttgctccgacgcgcggctctcggcgccctcggtctcacgggagagctcgtcgagcgaatcccggacctgctgcgcctcggctatcctgaagaggaggtactcctttcccgccgcctggtcttggaaccatgcggactctacgccgttcgccttcagcttcgcctcgatgacgcccttgacctcgtcgtagccgtcgatctcctggaactcgcgcatgtcgagcttcgcccactcgacggctgcgtcggagtccttcggctcggcttgcgttccgcccttggcgttctcgaaggccgtctgcagcttgctggcgcagcgatgcatggcgtcttcgcccatccgcatgccgaggcgcaccatgaaatcgaacagcttctcgccggactcgtcgccgaaatcgcctgccatcgcggcctcctagctcctagtgttccttgcttgcggaaggcatcgaggcgttcctggagtcgagctcgccagaggcctcccggctcgagaaggcgcgctctgccaggccgtcgcccttgatggccatctgcatgcggacgtcgatggcgagcgcccttgcggcgggctcgtcagcctcgaacgcggcctcgtcgaggtagctcgcgaccgcctccgggtcgtcggccagtgcgtcgatggcgtatgcgcggaagctctcggggcgatcgcggccgtcggcgatctcgtggtggccgaattcctcggacagctccacgagcttgtctgcgagctggcgcgggaacaggtagtcgaggcgcacgcattcgtcggtcgacgcggccctcatagacgcgatgaggcgttcgaagtccgatttcgagtgtgcgatgatgtgctcgcaggagaccgattcgaagtccacccagccatcgccgtccctcttcagcgcccaccactcgtcgccgccgttgacctgctggatgaaggctaggtcgtcgaacacgatcccctgcctgatggcccagttcccgtgctcgaagaacgacgtcagcgactccatgtcaggcgcagtgcagaactcgtaggggtattcctcgaggtaggggtcgtcttgccagtcgtagcctcctcgcatgagccagccgttctcctggcacttgtcctcgagctgtttggcggtctggctgtctacgggtgcaaggtgctcggaatcgtatcccatggcatctccgttctccgatggtatggcgcggaccgcgctggccgctttgtcatgggcggggtttcgccggcgcggtccaccatagcgctgtatacaacgacatcggcttgccccgtgcgctgtggcgagtcctatgccacgctaagccccgctaagccacggtttacctttggccttccggtggtcgatgtcggggagggtcacgatgtcgcacatctcgtagagcctcgatgcgatcgcctcggcgctttccctctccccggacctgcccagtcttgcggcgagcttcgaaagcggatactgggacgtcaccacgatcgggcgcatcccctcgtagcgagcgttgactacctggaacatggtggtgagcgcccagccgctgccgttctccttgcccatgtcgtcaaggatcaggaggtcgcatccggtaaagcgccccaccccgccgctctggcttccgtcgcgaccgtacgtcgcccgtatcgagtcgagcatggcgagggtgttggtcaggacgaccgagtgtccttcgtagacgagcgcccgcgcgagcgcggacaccgcgtgcgtctttccgctgcccacgatgcccgaaatgtagagcccgttgccgccatggcggtcgaacccgaggaggaagtcaccaatcgccggtatcgacgttctggcgttcgcgaacttcccggtcactcctgcggccaccaccctttcggcaacgttcctctcttgctcggcctgctgcaccctctcggtcctctcgtgctcggcgatttccccttcgcagccgcaggtctcgctcatcaaccaacgcacctgacctaacagctccacgccgagcggggtgagcggctttccgcaccatcggcatctgatagggggaggctcctcgaactcgaatcccatctcccgggcctcccgaggggtgaaaaaggcgttttctttcatgtcctatgctttcccttttccttttgggtgacggatcgtcaccggtgcgcctgacgagccgtcagggttgaacgcctctcggagcgacacgtcgtcatggggtgacagtttgtcagggggcgatggctcgccgtgcgccagtttcgtgagccggtagctcctcgtcacgttgccggaaggcgacgcatgcgtgccgacttgcactatgagtcccttctcgacgagctcgttgatggaccgcgtgaccgtccttggcgtcgtcccgaggaacctcgctgtcgccgacctgctctcgtagaactcggagtttccatccctgcagaacccgtagatgcgcgcgaagacgcgcagggtcaccccgtccagcccgaagtcgctccacatgaacctgtagacgactatgaagtgctccaggactggcggctcaacgctcgccatgctcttcctgctccttgtgaccgaaggcaaccagaaacgagttcttgaaaacccattttcccaagtcggacctcgagatgaacatcccgcgggccttgccgttcagccttctgaacggcaaggggtcctcgtctctgctcgcgagatccctgaccatgttctcgcctatcccgagaaggaccgaaacgtcctcgaccgtgtagtagtcctttagaggaacgtgcggcttggtttgctttgctgtcgtcatcgccgagtcaccccttcgatcgctcggttagaagctcctatgcgagcgatgtcggagtgattccgcgccaactgctgcacggcggtgccggattcgattggttccctaacgggtcgaatgtcccctgcagacgaccttgacttcatggcgtactatctcagaggtcgctgcccatggagcgcagcgtatcgtcgagctccttcttcctgacacgcaggagcctcccgatcctgattgcgggtatctgctgcctttcgatcatcttgtagacggacgacctcgagacgcgaaggtactcggcgacctgcgagacgtcaagcaggctgtctcccgagtaattagcgtccgaggtcggggagacagcaaatccccagatttccgcctcagtattctcacggcgtgcgcttccattgtcgggcgacccgtcgttaggacccccggaccctcgcgcggaagcccgtctcagtttgaagatatcgtcagccatgtaccacctctcgtctggcatctttcgtatcgaatgccatctagtgccaaggaatcctgttccttggacgatatcgagaggtgtactagttctgtcgatgcccgacaatgcggcgtgagggataggccgcgctaagccactgtaaggccctcttttccaaggatgcccgctgcatcttgcggggagataaccgagcggaccgaagcgggactctcgcaagcgcagctggcgcaggtcgtcgggatgaaccgacagaccatttgctgcatcgaggcaggcggctacaaccccaccctcaacctgcgcatcgccatctgcaagaccctcgggaagactcccgacgacctcatctggatcgaatggaggacaaccatgagcccactcaagaagctcttcgccagcggccccaaggacgaatgcctcaccgccgtagccgcccccgcctacaaggccggattccacatcctggcgttcggcatcatgttcgacctctgggcccgcttcaactacctcgcgcagacggacgtcgcgggcaacgtcgtgcagcaggcctctcgagtgcgcggtcctcgtctcggctctcgccgtggtcttcgcgattctggcgagaagcggcatctacagcgactcgctgcgcttcaccgaggcccgcacgcgaaaaaggaccgttggggcctgcgcttttctcgtcttcgtcagaaggagggatttttgctccacgaggcctatctacgggcaggagcctcatgtccggcgagggtatctccttgcgggccttccccctatagcccgagccagccagctcccctcccctgggcatccaccatatcccggtagatgcccgcggatgccgcaagctcttcgtgcgtgccgctctgcgcgatgcgaccgtcgtcaaccaccagaatgcggttcgcattcttgacggtgttcaggcgatgggcgattacgagcagggttttgcccgcgcacagctcgtttaccgcctgctggatggcgctctcgttgtcggcatcgacgctggcggtggcctcgtcgaggatgacgatgggcgcgtccttcaggatgcagcgcgcgatggagatgcgctggcgctcgcctcctgaaaggttggcgccgccctcgccgacgacggtatcgtaaccctcgggcagggcacagatgaactcgtggcagcgcgccttgcgggcagcctcttccacttcctcccgagtggcatcgggacgccccatcaagatgttgttgtaaacggtgtcctgaaacaggtagacctgctggaacaccatgctgatgctgtccatgagctccgatagcggcacgtcgcgcacgtccaggccgcgcacctgcaccgagcccccgctcgtatcccagaagcgcgccagcaggttcgccatcgtgctcttgccgcttccggagtggccgaccagcgcgtacatggtgccgggcacctgcgcgaagctcacgccgtggagcacctcgtcctcaccgtaggagaagctcacgttcctgaactcgatttcgggcgttcccgtggccggctcggccggcagatgctgcaccccctcgtcgggcagctccgctcgatccatgatgtcctcgatgcggtcgaggcagctgctcatgaccgtgagacgcgtcgtgtcgccgttgagcgccttgatgggcgcgaacacatcgaagacgaagagcatgaggccgaccgcgaacggcgctgttagcaagcctgcgctctgcaaggcaatcgccgcgacgagaatcgcaacggcaccggctgcatacagcacgtagagcaggcgctcccacgccgtctgatggcgctcgaacgcgatgttctcctcgcaggagcggccgaagttctccctgagctcggcggattgctcgccaaggaggttgtacgccttgatgatggacatgccctcgaggtagtcgatgactgcggtcgtgagcctctcgatctgattctgccgcgtcgcgctgtcagtcagagcgctcgttcgcgcacgttttgccacggcgacgattgcaaggagaaccacgagcgcgagcagagcaagccaggggctcacccacgcgagcatgatgagcatgattgcctgcgtgaacatgtggcccatgagatcggcgatggcgggggtcacggtctcctcgatgaagaccatgtcggtcgacagcaccgagctaatcttgccgatggcgccctcggtgaagtagcccatgggcattcggcgtagatgcgcgccgagctccacgcgcttgtccgccatgatcaggtagccggtgctcgcctgcaggcggtcggatgcgtaggcgcaaagcgcttgcagcgccaggcatgccgccatggctgcccccaagccgatgcagagccgcgcgtccgccgcgtcttcgtagaaggcgacgagtccgaagagcgcgagaactattggagccttggagagcagcgagcggaggaaggagaacgcgaacgcgatcttgatgcgcccaccatggttgcccgcgagcctgaagaaacggcgaatcagcttaatcatggttctcctcctcgcgcttcgtggagacacgccatgccgagctggcgcacgacgcctcccagagcgattggtatctctcgcagcgttcaagcagttccccatgcgtgcctctgtccactatccggccagcgtccatcacgcagatttcgtcggcaccgacaatggtctgcaggcggtgcgcgatgacgacgaccgttttcccctcgatgatcgaggcgatggcgcggcccatgcgttcctcgttctccggatccatgaaggcggtcgcctcgtcgagcaccacgatgggtgcgtctttcaggagggcccgcgcaagcgagacgcgctgacgttggccacccgagaggagccttccggagtctcccgcattcgcgtccaggccgtccgggagctttgccaagaaatcagcgcattgggcgcgttgggcggcttcgtccacttcctcgtcggtcgcgccgggctttcccatgcggatgttctcgcgcaggctcgtgttgaagaggaattgttcctggctcacgtagctgatctgctcgttcagggcttcgaggctcatgtcgcacaggttctgaccgcccacctcgatggcaccgccgtcgaggtcgtagtaatgaacgagcaaccgtgccagcgtggacttgccgcttcctgactcgcccaccagcgccaccgttgagccctccgggacgtccaagctcacgccgtggagcacctcctcgtcggcgtacgagaagcgcgcgtcgtcgaagcggatgccgtggccgttcccgtagaaaggcgcatccgcctgcttgaggggcgccgcaacgagggcggactcgagcgcctcgatcttgtggttaatctgcggcatgacggatatgaagctcatcgcacgcatgagcggagcgccgatgccgaaccccaggcacagtaccaggacgaggtcgggtagcgttgagaacccctggatcacgaaccaggagcccacgggcaggacgaccatcgccacgcacggcagtatcgacccgtacagcgccatccacggccagctcgcgcggtaccagtcgattgtgaggtcacggtaggagcggatatcgtcctcgaagcggcgatagctctcgccgtcgcggttgaagaccttcaccacctccatgccgttcacgtactcgataatggtgacgttcatcttctgggcactgccgtagtaggcgcccatgcgtcccatgcccaccttgtacatgatggcgctgcacagaattcccaaggggagcgagcataggctcagcagggcgagcttccagtccacgaagaacatggccacgtagacgatcgccggcacaagcagattggcgaggccttctggtagggcatgggcaagtaggagctcgatgctgtcgacatcgtcgatgaaaagctttttgagagtgcccgtgcccttgtcctggatggtgcccagaggctggcgctccagcttggactgcatggcacagcgcaggttgcgcaggatgttgaaggcggcgtcgtgcgagatgctcagcccccgcacgtagaggagagcatggaagatgccgcaggcgaggatggcgagcacccagggaagcactgcggcgacgcccagggcctcgtgctccagcagggggcggatgatctgaaacaggaacgcgtactgcgcgacataggcgatgagcgcgacgagcatcactcccatcgcctcgtaggtgcggctcttgtacgcgcctgcgtaggcgaatacgtttttgaacatgttcggctcagagctcctttgcatgctgcggctcgtgctctcagaacagcgccgcgatggcctctttttccgctcggacatttaggtcggactgcagtctgccgtcggcaaggtggatagcccgcgtgcagcagcgcgtcacgagttcgtggtcgtgcgtgatgacgaaaacgatccgcccatcgtctgccagggcgcagatgagctccgccacgcgctggaggttcagctcatcaagaccgcttgtgggctcatcgaggacgatgatttccgagtgcttcatgagggcggcgccaatcgtcaccctctgcttctgccctccggaaagcgatgctggatggcgggactcgagtccggaaagtccgaggcgctcgcacgcccctgcggcacgagcctcggcgtcgggttcgccttccatgccgagcaggagctcggctgccacgctctcgccgaacagctggtaatcagcgtcctgcatgacgaagtacgatgccttcctgagcgctcgggcggacatgcgcctcccgttgagacggattatgcctttcgaggggcggcgcaggccgctaaggatgctcgcgagcgtggtcttgcccgcgccgtttgccccaacgagtgcgatcacctcgccggaatgcgcctcgagacccacatccctcaaaacttcatgcccacgcttgtaggcgaaggacagcgaggacacatcgaggtgcgggaggcctgccacggcaggtctcctcgatccctgagcgcgctcgacgatacgcctcggggccgtctggcgcagggagtatcgttcacgcccggcggcatcgagcgcgaggaactcgttccgctccagttccgctgccttctttccgcccgacatgacgacggcacggtccacgacgccggaaaggtactcgagccggtgctcgacgatgacgatcgtgcgcccttcgcatttgagcgttgcgagcacctgggccagctgcccggtcgctgttgggtcgaggttcgccgacggctcgtcgaacacgaggatcggcggagagtaggcatgcacggaaccgatggcgatgcgttgcttctcgccgcttgacaagctgaagatgctgcgctcgaggagtccggacacgtcgagcgcgcatgaggacagagcgatgcggtcgagcatctcgtctcggggcattcccatgttctcgcaggtaaacgccatctcggacgttgtgtcggtggtgaagaactgcgaacgtgggtcttgaaacacgctgcccacggtcgcagtgagctcctcgacgctcatgtcggccacgtccctgccgccgattttcgccgcccctgccagctcgccttggaagaagcggggaatcaagccgccgatgaggcgcgcgaccgttgtcttgccgcttccggaagggccgcacagcaagacgcattctccctcggagatccgaaggctaagcgaggagatgctgggagctgcggctcccgagtagcggaacgtggcgttctcgatcgagatcatgcaatcacctgccagatcacgatgccgccaagcggcgtagcattggcaaaagcaacaattaccgaaaagacggcaagcacgacaaaggcgaaggcgtccctcccgcgcagacgcacgtcacgcacgcaggtacgcctgcgctcgctttcgatgccgcgactcacggccgagagcgaaagctcgtctgcgaccttaaggcagcgcatgaggagcggcaccataagatgctcgagcgcggcgagcggccttcgcaggacactcgtgcccgtaagctcgagaccgcgtatcctgagcgcgtcgcgtatgctcgacgcctccttgccgatggtggggatgtaacgtagggcgactgcgagggggattgtcacctctttggggaggtgagcacgctccagagcgcatatcagctcgcccgtgcgcgtgctgtgcacgaaccacgcgaccagcaggaacacggggatgaacttcacgagcgtgaagccgacgaccagcaggatagtcgagaaaagcggcagccggtaggcggctgaaagcgccagcaggaggttcatgcccgcatagatggtgagcgccgtgccagccgctcgcccggcgccgcccgctgcggcgagcacgaacgccgcagcggcgataacgagcacgatagcctcgcctttcgctatgaggcacaacgtgctcgtgacaatcacgataacgagcttcgtgcgcgggtcgagtcctctcacgccgattgggacggcggatatcagccgccgcgtcccgtctacattccttgggctctctgccatgttgcgggctctcacttctttgtgcgctactcttcgacgagacctgcgcgcacgaaatgcctgcgcaacaccttgcgaccgatgagaccgccgacgagggcgagcgccacgccgacggcaaccatcacgagaagcatcgggtcggagatgaaggaattgagggtggcgctgtactcggcggggatgccgttgttctgcatcgtctcgttgaacgcgtcgcgcaacaggacgatggcgccgcagtagccaaacgagaggccggcgacgctcaccgcgtagctcgcgagcatgcgcttcgggttgcgggggttgccccacatgacggcttccgcgatgacgcaggagatgaagaagcacagcacggtaaaccagaacgtgcccatcaccaggaagatcaggctgtagactacgcccgagatcgtgaacaccccacgcttgggaaccttggcgagcatcagcatgtagatgattccgttggggattgccgccagcgccgggtagaaggggttggtgacgggggaaagcccgcagacgatgccaatcaccatgcagacgaccgccgctgcggcaccgagaacgccgatgaggacaagatctttcacggaaagcttagagctggtttcgacagcttggctcatagaggcctccttgatcgcacggaatacctggtctctattggattatttacctaggcttacttcaaccgaaaaccgttcaaggtcaacccgaatccggtattcccttgtcggggcctttcacggcaacacggttcagatgccgctgggggagacgccgtagtggtctttgaaggcctgcgagaaatggctcgggttcgcatagcccaccgtcgctgccgcttgcgccacgctcagaccctcgacctcgatgagcgcgcgagcccattcgaggcggtgctcaatcacgtatgcatgaatggtggtgccgtagacctgcttgaagacgcgggagagcttcgattcgctcaggcatgccattcgtgcgagttcggggtaggtcggggggtcgatgagacgcgaatcgaggatgagcttcgcctgttcggcggcttcgcaatccgatttggagacgccgctgctttgccgctgactattggtgtcgagcatggcgacaaccaaggccagcaattcgagaatcttcccctcagcatacagtctgccaacgccgccaacgaaggcattatgacgcagagaggccaaggacgccctcattgcggaggtcatgggcgcctcgaacccgtccgcgccgactaggatgaccccgacgtcgccattcatatcgcttcgacccgccatgcccaagggaatacttagactgacgaagtcgtattctaagttttggagatagcagatgctgtggggtcctccgcttctggactgcacgaagaacgagtcggtatcaaccgatctggcaacctgacggacggcgggacagccagacgcccattcgactcccgttccgacgcagaatcccacattgaccgaccgagaaagcccctcgtcggagaaactcacgcttcttgaaaacagcatgcggtgttcgcatgcggagatggagcccgatgttccgagcgagcagatgcggcctgctcctatatcttgcggaaggggaaagtcgatccagccgcctgaaaccgcatctcgatgagccgcatatatcgtattgcagccttcggagaactgcggtgtcgctcgccctttgtccacgcgcccgttaccattccttcgctcgctttagttagactcacctaactatttaaccgattgtatcacagggaccatcatcgtcctggtcgaaaaagtgagagagggctctttccattctgtctcgtcattctctgctcttctggcgttatcgcttgcggtgcccattcaattgggactcaggcgggattggcgtcgttgcattttcccagattaggcgtttgcttcctcgtggctgaaatttactctccggtgatacggggaaagtccggcggcacctgtcttgacgtgaactcggttacgtacaatcgtttcacgtttccgctggtcagggatttactccccgacaacctgttaccattccagcactttcgcgtgctacagtggaactcagtactgagttccaggtgagttccagttttgagacgatttcgcactgccgggagtaaatataagcgcagttcagagcacgggttgagttcacgaatgctagagtatcgacaatagagtgggaataaaaaggcctctgagctgggtgtttatcatccgtcccatctattggcaagtcaagtacaagccgcccgcgaacgaggatgagcaaaaaattttggaaacccctggaatcgtcgatttcgggggcttctttcatgctatttcacctgcacatatacaccccggcattttccgattgcgagggatccttgctagacgatccccgccctctcgaagtgctttttcatgaccttcagggatatgagagcgcccgccaggctcgtcgctattgtaagagcgaccatccccgcgtacatgggttccgagaacaatgcgacgaactgcgccatcgtctcgtcggtgagccgcaggatctcctggcgctcagagaggtattgagtggcggagaggtatatgggaagggtataaagcgccgattgcaacgtgcagccggtgatgtaggccgcgacgagccctctcctgttcgcgtacccaacgcgcgtggcgaccgcctccgcaatggcccatcccgctatgctgcctaagacaccgaggacgttcgccgccatcaggccgggcagcacgtttatggttcccatgatgaggaaggtcccgggctttttgacctttgcggcgaggagcaggtagactatcgatgtgaagaagcagactatgggtatgttagcgaccgtcccaacgacggtaagtccggcgatgcctcccaccacgaagaagatcagaagcgacaacgcgccgaaaactccgatagacaccagatcacgaggtcctatggccggggttttgtcttttttcataataatgcctttcttttgtctcgtttgaggataagcgtgcgttgccgagcaggcgatccctgctcggctttgtcatcgcggtccgaattggagccacataagcattccggtcgctaggagggccaagacgcccgcagcggcgtccctcgccccgaaggacagggggttgagcaccgtcggccgcgcaggaccgcccagaccgcgggcgagcgcggatgccgccagctcgtcggatacccttacgctcctcatgaggaggggaaccaccaaaagctcgcacacgacggcgagacggccgagggcataacccctgcctgccagcacgcgccgcatcttcagactctccacgaggcatgaggcgtctttgcgtatggtggggaagaatctcagaatgaccatgcacgggatgagaaccgcctgcggggtgcccatggcttgcagcgcggcgataaggctctgcatcgaagcgaatttcgacaaggatattcccagcagggccagcaccacgaacttctgagccatgtagctcagcatgaccacggcgatcacgagcgtcgtgccgccggttccttcgacgagggtcatagcgattgcgatgagggtgtatgcggcagataaaacgacgcacgagcgccatgctccggctgcaagcgcatatagggccccgatggcgcatgccgcatgagctgcttccggccggttggagagtatcgccgcaatgcccaaaaggcaggttgtaagcagagctgtccgcggatctaggtgtctgcatgggtgctccattgcgcgcctcctttccaaagcgatctcaagagcctctctcgtgtcgagccatcgagtgcgaagtcgtcgacgatgagcccatctctcagatggaggatgcgattgcaggtggagagcaggaactcgaaatcatgcgagacggtaaatacgatgctttcggatcgagcgagcgatttgattgcagaggcgactttctccatgttctccctgtccaggccgctcgtcggctcatcgaagaaatagacggcgctctcgtcgacgagagcgcatgctatcgtgaggcgttgcttctgcccccgtgagagcgttgcggggtgcgcccccctcatgtcccatagccccaaccctttgagtgcgcgcttgcaagcatcggcatcccttcgcccgcccaccgagagttctcccagtacgctgtcgctgaaaagctggtagtcggggtcctgcataatcagtcggatccctccaagccgctcctttggtgagacgggcttgccggcgactgacacggtaccctgattctctttctcaagcccgcagcacaagcgcgacagggtcgtctttcccgcaccgttttcccctatgatcccgattacctcaccgggctgcgcggagaagctcagagggccgagggtgcaggagcggtgcggtgtcgatcctgcgcttctcgtcgggcgccgcgacccatatgagaacgtgaggccctttgcctcgaaggccgttccctcgtgctttgacaggagcggctcatggtcgggtatggcgcttagcgccgacttcagctgcaagctcctgaggcccatgtgggcaagcgtggtatcgtcgagggataatgcgctggctgcgtcgtatacgcgggacacggcaccgtcctcgatgacgaccatgcggtcgatgaggctggacaggtagaagaggcggtgctccagaacgatgacggtcttgccctctcgcttcagctcggacaacgccttcctgagagcctccacggcctccatgtcgaggttcgcggacggctcgtcgaagacgtacacggaaggccccatcgcgtagcaggaggcgatggccaccatctgcatctctccgctcgagaggccgaacacgctcttgccccgaagatgctggattcccatgcgccgaaacgcatcctcgacccgctccagaacctcggcccgcggtagccctgcgtttacgcagccgaatgccacctcgctcgtcgtgtcggtcatgaagaactggctgcggggatcctggaagaccgagccgaccagccttccgatatctccgattcccagatcgcgtgtgtccgttccgccgactcttgccgctccttccagctcacccgcatagaaatgggggataagcccgtttatgagccgtgcgaccgtggttttcccgcatccgctcctccccgtcaggagcacgaactcgccttcatggatatccaggtcgacgctgcggatcgcgtcaccgtccttccccgcgtattggaacgtcaccttgtcgagggctacatgcgcaggggcgctcatgcccggccctctgccttggttccctgctcccagagggcccgatagtagccagcgccctcctcgaggagctgctcgtgggtgcccttctgcacgatcttcccctgctgcatcacgattatctgatcagcggagcgaatggtactcaggtggtgcgccaccacgagcaccgtccggttctgcgcgagcgcagagatggccctttgcatgagcacctcgttcaccgggtccacgttgcttgtcatctcgtcaagcacgaggatgggagcgtctttcaggaacgcccgcgcgacggacagcctttgcttctggccgcccgagaggcccacgccgttctccccgatgggcgtctcgtagccctgcgggagcgacatcacgaactcgtggatgcacgccttcttggccgcctccaccacttcctcgtgcgtcgcatcagccttgccgatgcggatattaccctcaatggtgtccgcgaagagccgcacatcctgcatgacgatgctgataaaggccagaagatcgtcgtaggggatgtccctcacgtccacgccgccgacgctcacgcttcctgcatctacgtcccagaacctcagcaggaggttggtcagcgtgctcttgcccgatccggactcgcccacgagtgccgtcatagtgtgttcggggaccgcgaacgtcgcctcggacagctcgaacgagtcccttccgtaggagaagcgcaccccgtcgaacctgatcgagtgcgatgaaggcacgcgtggctcctcgggctcggggacggcaggcgcgtggacgatcttctctatcctgcggaagctgtccctcaccttgaggtagttcatccaatgcgactccatggcgaagaacggcttgtagaactccacgctcgcgacgatgaagccgatgtagacgaacaggggcaaagagccgctctgcacgagcagggtgccgcccgccgccatgaccacgaaagcgaggtccgccacgaagctataggcggacaggaccagcgccctgttccgcgatgccgccttgctgctctcgccaaagttcgctaccgtcgcctcgagcctgtggtcgagggcctcgcttttggcaaaggccttcagcagcgggacgcccttcacgtactcgacgaacaggctcgtcatgtccgctgcgtcgtccccgcatcttccctcgagggcttgggccttcctcagccctgccgcaaggagcgcaagcgcagcgggcagggtcgataccgtgagcagcgccatgcgccaatcgacgaggatcgcagccacgagcagaatcgccgcaacgatgaaatcggctgccatcctcgtccagaggtgtcccaccaccatctccatgttgtcaatgtccttgtgaacaatatcgccgatctcgcctaggcgctcccccgtgtagaagccgagggagagcgacttcagccgcctgacgacggcgatcctgatttccaacacaaggtcgaaacccgcgcagtgcttctgcttgtcggcaacgatgccgctcgctcccttgacgaggagaaggcagacaagcgccacccagtagggagcgaggtcgaccggtccagccaggatcgaatggatggatgcgaggatgacaaaggccatcgccacgctggatagtgcatagatcgagaacgcggcgatgcttatggacatcatgcgccggccagcaggggtcatccgtcctagaatctcccttaccatgatgcgacctccctgatatcccagttgtccacctgcttttgcttggcaaccatctcctgatagagaggacaggtgcgcatgagctcttcgtgggttccagacccggcgacacggccttccctcatcaccacgatctgctccgctcctcgaacggcgttcaggtggtgggctatgctcacgacggtcttgtcgcgggacaggtcgtctatcgcctcctgtatgagggcctcgttctcggcatcgactgcggccgtcgcctcgtcgaggatgacgacgggggcgtctttcagcattacccgggcgatcgagatgcgctggcgctcgccgcccgagagctggacgcctccctcgccggcgaccgtcgcgtagccttgcgggagcccggagatgaagtcgtggatacgtgccctttgggccgcctctacgacctcttcatgcgttgctctcggccggccgatgaggatgttctcctcgatgctctggttgaagaggaacacgtcctgctggactatggagaagaggcccgacaactgcctttcggagaggcgggacaggtctcgtccacccacagtgatgtgtccgctgtcaggttgccagaatcccatgatcagactcgcgagcgtgctcttcccgcatcccgaggagcctacgagcgcgttggtgcttcccttgcggaacacgaggtcgatcgagtcgagggcctgcttcctctcgctgccgcacccatcgctctttgggtaggagaacgagactccgttcagctcgatgtctcccatgcgaggttcctcagagtccttgatggggtctgcggcctcaacgcccagcactgactcgatgcccgtcatcgcctggtcgaacatgaaacgatagtgctgcagggtcgccgtcttggccaccgaggaggtgaaggccgcggagagcaccatagacaagatgaggcgttcgatggatatgctgcctgtggagaggagccatgttcccacgatcagcacgagcaccgtcccggattccatgaacagggcgatgagcgccatggggacagagacgtcgttcatcgagctcgtcgcccaactcacgtaatcgcgcgccgccccgactgtctcttccgtcttgcgctcctcctttccgaatgccttgacgaccgctacgttggcaacgtattccataaggctgttctgcatacgggaggcgtactgggccactacttcgaagcccctcgcccaagcgggggccgccgccttcttcacgagccacatgaagggcagacccgccatcatgcacagggcaagccgccagtccactgcgagcatgaggacgaacgcggcggcgggaaacagggtggccgaggctgattcgggcagcccgtgggcaaggtatacctccacctgctcaacgtcgttgcgcatgatgtttgcgaggtctcccggcctcctgatctgaaagaagcccagagggagctgtttcagatggcgcacgatgcgcaggcgtatgtccgtcaggcacgagtacgccacccgatgcgccttccaagttgcgacgtacatgcaccccgcctttcccgccacgcatgccgccatcgccgcagcggcgcaggcgatcgccgagggcgagagggtgccctccaaaaacagatggacgaggtagatcacgagaaccgtgggcacgagcccaaggaccgccctggtcagaagcatggcattagagagccgacttttcgccgtcatctccctggccaattccctcttgtctttcatagaatgtctccttcaatattaaataaagattcgatattgtaagtagattaaggtctatctcagttcgacttgactaactatatcattattgaattaggattcaatattgaatgtcagagtacccgaatagggtggcagaaagctctgtcacagggagttcaccccttcgtaatagcactgggcgatgagcgcaagcatctcacgagcttcattctcgctgctgtagtggcgggctacctccatcaggctctccacgaaattgcttgcgagcacgtgggcgagcaagtccgggtagcgcagaactgcacgctcgttcatcatgtatcggatatgccgctcgatgctctcgacgaaatcgtccttcgcatgctcgtaggcggtaccctggctcttgtcaattaggataaccagcaacttgtgatgggccagcatgttgagcaggggttcctcggcggcaatctggtacctctcagagggcgtatccgcaatgatagattcttcctcgcgcgcgatacggtcgaagtcgaagggaacggacgaaacgacgccctcgaatagcttctccttgttttcgaaatatgagtacagcaggctcgccgacacgtcggcgagcctcgcgatgtcctgcatttttgcgctgcggaagtccttctcgtagaacacctggacggcggcggcaagtatgcgctcgcgcacctcttccttgagaacctgcatgccctacccctcgattcctcttgctgttgaattataattcggtattgaatcattctaaacgatgcccagagaacggcgaagggcagaaaccgagacgtttccgttcgattatctggtttggcgaaaagcattcgtcatactttgacttgcgccgtgagccaacaaaacagattcgagatgaagtattgatgacaagagaaaaccacgaaaactcggtcaagcacgaatcagtcaacgacctcccctccatcaaggagctaaaacgcagcgcgtcgggactcgaatggctcggaaggctgctcaggaacgacgaggcgaggaagagcgtgcgggaagtccgagaagagctcgacggcctcgtctcgctcgtcgatggcttctaccatctgctgggcgataggaactgggtcttctcagacgcgctgaacctcgaaaggatgcgcgcggtcgtcagcaagcccacgcccggggaagccgagcgagagctcatcgaatatctcaaggaggaagaggttctgcatcgaatgatcaccaggctgaaccgctttcccgacatgcgcccgcgcataccgctcctggagaaggccgaacaagactacctccaggggcgttactacagctcggtcctcgtgacggtcaccgtgatggacggattcgtgaacgacgccttccggtccgaagggaggaagggcctccatgcgagggagtcagaagagctccatgcgggagactgcatcgcgaccgtgtgggatgggctcccgtccatccagaaggccttcacgaaatcaatccgcgcgaggatagatgaaccggtttgcgaagtctaccgtcacggaatcatgcacgggatggtcaccgactatgacaacgacgtggttgcctcgaaagcgtggtgcatgctcttcgccgtcggagactgggtcgatgccgaggttaggaaacgagagactgaagacgaagaccctcgtaatatcgttcaagtactcaagggcctctcggatatgcagaggcgcaacgccgaaaatgacaggaggctcgagagctgggagaagcaccgtgtggatctcgagcatcctgcaggtccagacgaagagctcgtcagaggctgcacgggattcctcgaggcttggaaggcgaagaactacggggtgctggggtcgttcttccccaatttcgcgaacagaacgccaggcgcgcaggccggcgaggcgagagagctctattcttcccatccgatcgagggatacgagatagaggaaattatcaggcccgccgccgcggtcgccagcgcaaagataaggctccgcacttcggacagatcgtggaccgcggcgatccgcctctctcggctggagggaaccgctccggctgctgattgggaaccgggcgcatggaaggtgatgggatacggggtcgaccccttcgttgatgcagagaagaatgggctagcaggtgatgtttctccggcttgatggaagacgctatgcagcctacccgcgctgatgccacaaagctgaagagatgccgagcaacctgacttgaaacctcgaatcgcgaaacgagcgcaacccatgccgtcaaaccgcaatctccaacgtcagcagcagatcgacgcggaacgtacggttttcgacgatttggatgtatgaggttgtgggtcaagcttgccgattttcaccttcgcggatctgatcgtttgttctctgggaaattatggaacccttgcagaagccaattcaaaagagaaatcgaccacgtgcaacatgaccacgctttcacagtccaggccatttgcccctagcgaccccgcattcattctcgctatcgcgtgctaaagtggaactcagcactgagttccaggtgagttccggttttgggacggtttcgtggactcaaaaataaatatgatagctggtcagaccatctgttgagttcacgctcttggtttttgtgacaatcgaagggaatagaaatgggcctcgacagcaacgtctcgcagttcaattatttcgggaaccatggcggcgccgtggccgccatggcaacggacaacgcatcgatcacggcaaaccagacgaacggcgcgacggccgaagagctcaagacgatcctggaagacctgaaaaagtcggcaagcgagctcgatgccgataggcagcaagccgccctggaaaccatcgaggccatgaaggaggccttgtccgacgcgcagccaaaaccctcaatcgtcaaaacgatcatgaacggcctcaagggtttcaacgactgctcgtcctttgcgacgcatgtcgcagccctagtcacattcgtgtcgacgcatttcccggggaccctgggatagtttgcgaaaaaatgaggcggcttgcatctgattgctgcaaaccgcctcaccatcggagccgccatagcctttctaggtctatccgctcatcatctccacgtctccatgcgcccgcaacccacgcagtcttctcaaacgacgcggaccctcataaccgccacacatagccgtccagtccaatattcgcaaaatcacgcctatgggcaggaggcaccgacgcctcctgcccattccttcctcgccgaggagcctagggctagtcgagccttatcggcctctcgggcctcttcctccccgaacagtacgggcagtagcccagcttggcccccaccctgtcgcggacggccatctggtagacgtggccgcactcgccgcgccaccatacgggcttgcggcttatggcctgcacgccggtgggcctcaagcgcttgttcatacgcgggtgccacatcgccgctctgtcgggatgcgtggtggccaggtcgttgtggccggcgagcaccttgcgtcccgagcagtacgggcagcccgggtccgccttgcccttgcgcgcccggttcgctatgaggccggaccactcgtggccctcctcacacttccaccagacgcgcttgttggagttggcgatcacgtcggtcggcttcaggtcgccgttgcgctccttgttccactccctcgcgatcttgggatgcgtcgtcctcaggtcgttgtagcctttcagcaccttgcggtcgccgcagtaggggcaaccgcggtcggcgccgccggtcctgttgtaggcggaaatccgccatgcgtgcccatgcccgcatctccaccagaccctcctcgcgctgccggagacgatgccgtcgggcctcaggtcgccgttcagcccccaatcccactcggccagaagctcggggtgctggctcgcgaggtcgttgaagccggcgagcacgcgatggcccgagcagtacgggcagcccagcccctcggcggcccgctggcgcggggacatctgccattcatggccgcagcctcccctccaccagacctgcttggtcgaattgaacctcacgccgtcgggcctcaggtcgccgttgcgcccgaaatcccattcagccgcgagctcgggatgcacggtgaccaggtcgttgaagccgcgcagcagcttgcggttcttgcagtacgggcagctgtcgtcgatgcgcatggagcgcatgctcaccttctcgcgccagacgtggccgcacggtccgcgccaccacaccatggcgcctgcgtgggcgtggaggtcctcggcgcgcaggccgccgttcagctcggggtcgagctgtctggcgacgtccggcctctttgacccgaggtcgttgctgcccttggcgagatagtgtccccttcccccatggcacgacgggcacttgcggctccctttgcgagtcccccgcaggctctcgcgccattcgtacccgcacgtcgggcattgcagccagatcctcttggccgtacggtcggagacctgcgaaggcttcaggtcgccgttcttggtggggtgccaaaggtgcaagatgcccgcgtccaggcactcggcgctattgaagccctccagcgtcagcctcctgccgcagtacgggcatccggcatcgctgaacgccctcgtcctcacggacagctgccaactgtggccgcactcgccgcgccaccacactcgggcaggatcgcagcgcgagacgtcggacggcttgagggacccgttccgctccccgtcccattgcgccagcaaatccgcatgcccgaaccgcaggcaccactcctcgaagctgacgttgagctccgcctccttcagaaagcgcgaccacttgacgctggacttgccgtgcccgagggcgtagcccgcgcgcccatcggcggcgtccagcgcccgggcctcctccaccaacgaatcaaagggggccagcagttcggcccggccgtgctcttccagccactttcggggattctgcctccagatgcgcgtcatcacgccgtcccacaggtaaacctcgcggtggctcgcgatgctcaccgcgtcgggcgtcaggttccggttcttcacgggatgccagagcgcggcgagctcggggcacagcgtcgcgacgtcgttgaatcccttgagggccttcctgccggagcagtacgggcagagggcgccgtctcggctgttgacccttttggcaatcggcgcccgccactcgtgaccgcacctgccgagccaccacacctgctgcttgaagtcgggaaagaccgcgctcgcgggcagcgggttcctcgtcggatgccactcctcggcgatgtccggcctcaccgcggccagatcgttcttgcccggaaccaaagcgacgtccgcgcaggccaggcagtcgtcgaaggagcggcccgttctcctggccggcgcctccacccacttgaacccgcagtcggggcatatccaatggatcggcctgacagagcggcagacgcagtcgtgcgggccctggccgccgttggcatcgtagtcccattgctccagaatccgcgtgcggcgatgctcctcgcaccagacgtcaagcggcttgaaccggtcggggtgcacgcccggcagcccctcgaacgtctcggcgccgtcctccctgcgcggatgcctcgcgatgcactgccgcctgtcggcggtgtagacctcgatggcgtcctcggcgatgcgcacggcgaccttgcggtcggcatagcgcgggggcacgccgtagaagttgccgcgcaccctcaccacgccgtcgaaggagacgccgaccttcctccaggtgacgggcgcgaactcggcctccggcagcggctgcaggcattcgcgctcctccgcctcgaagatctcgttcctgctgcgccccttgaatgccacgacgggccggtcgttgtagacctccagcagctcggcaatggccagattgagctggccgaggctcgtgaaccgcatctgctccagcacgccgacgatgctgttggccatgatgcgcacatggctctccacggccgccttgtcggtgggcgtacggacccgcgcgggcaggaccatggcgccgtagtgatccgccagctcctggtaacgcggatggatcgagcgctcgcggttctcatcgaacaccactcccgttgcaaggttgtccggcgcgacgaagagcggcgcgccgccgaagtacgcgaacatcgccttatggtgctcaagccacgactgcatgcccatctccaggctcgcgcgcacgaaggtcttgtcgctgtaaggcagcgtggccacgaacagcgacaccggcgtcacctcctcgccggcgccgtacaggctgagtttcctgccggcccaatccacctgcacctcctcgccgggatgccaattgacgagcatcttcgcgcccctcgcccgggctttgaccagctgtacgaacctctcgcgaaacgtcgcgaagacatagggcggcctatccacggaaagggcgacatacgccgcatatgcctcctcgacgtcatccgcgtccagtctgcgcccagcacggccttggatatcctccaggtcgacggggttgcagcgcgccgcgtcgtggggatccaccagcctggccagctcgtcgtcactgagctccaccggcacgggccagcccaggcccagctcggcggctcgcctcgagacggcggacgccttcgtggtgctgcagccgcagaggaaggcgaccttctcgaagctgagccccaccgaacgcagctcgatgatctccctgtaaggcagcgtgctcattcggcatcaccggccagcttctccatgacctcggcaaccccgatttccccgccgccgtccaagaccgcacggcatgcctcgtccaaagtgaccccggcagccgacggcgtctttctcaaatcgatcagctccttgcaggcgcggaaccccttgccttccttcttgcaggcggagagcacgtgcttcatgacgcgcaccacattggcgccctcctccctagcgagcgccagaaacctgtcatccatcctttttgcgaaccaacgatgcccgggcggcctatgcgcgggatcggtcactgtgcaccgtccccgcatctcggtcatgcgctcgtgccgggcaaccagctctccgttgagatacgagcgcacctcgccgtcggtccagctgacgcgcacttcctcgttcgagcagcgccatggcgccgaatagcgcacgccgtcgaccacgaagtggtagtcgtcccgaacgacgcgcgtcgaccacgtggcgaaatcggcatcctccgacggaagctccagcatctgtggcagctcccgctccttgaacagcgtccagcgggccggcctgccctccgaccctatggcgttgtacgccaccagcttcccctcgacgtaggcatcgaggtcctcgaagctcgcgaaatccatgcccgcgacatcctcgatcaccttccttgcgacgtacgagacggtcctcgcgtccagcggcttcccggcgccctccgcccccttcgcagtcttcggcctggcgccgtagagcaccgtccgataatgccgggcgaacgcctcgatcgtgctgcgtgccgtagccgagaccttgcactgcgcgcagtcggtcacgtacggcacgccgccgaacgacctgaatgcccgctggcaacaggccatccagctcttggtccccatgtcgtcagccctgtataggaacgtggcgtcgctgtaggccatcgctgcgacgaacaccgggaacgccgcctgctcgccggcaatctgcgccgacccccttgaccagtaggttctcatgtactcgcccgggtaccactcgggaatcccggcggcccccatctcacgccgccatccgcgcaggcccgcgcagaagctcgagtacgcgtacggcctctcgccggcttcgcggcacgcggccacgtactcggaatatgcgtactgcagccgccatccgcgctggtcgcccatgcgcttggcaaagtgctcgtagtttggcagggcgcagaagcgccggcatccctgggcgctcacgatcttgccgttattcggttggaggcttgcgggagccttcgccttcacgcccccgagcagctaaccatcgccgtcgccgcccttcggcaggttgcggtacagcgtgctgcggctgatgccggtggcagcggtgatctcggacagcttgtgctcgccgctctgatacatgccgatggcgttggccagggcgctggggtcgaccttcgacttgccgcctgtgtgcccgggcttcgcccgagatcctttccggtcctcgtcgacgcccatgatggcggcggcatgccggaagaacgccccgtgctcctcctttgacgtgtcgatgccctggtcgaggacgaccagctcggcggccttcgccccgatctcaagcgctgccctcaccgcggacgcggaggtggagcccagagccccaagcgacgcgaccacgacaacatcgccggcgtcgatcgaccccagcagcgatgcgatgccgctgtccaccacgagctcgcagccagccgcctccagcgcctcccgttgcttattcggaccatggccagctggcggcctgcagtaaccgaccctcattcgcgctccttccgctcgcgtacattctaagccccacgccccccgcgcaccgcgaacgcgccccgaaaccgcgcacgcaagccccgcgaccccgcgccgtcgccgtcgacccgccaccgtgctctcgaacacgcatgctcgcatgcccccgctcataccgcgcaagggccgtcgacgttctccgatttcttttccccagcgccccctgggacgccggggaaaacaaaccgccctgcgggcttcgggcaacggcgcctcctgccgtcggcttctcctttcccccttgcacggcagcgggcccatgcggtccacgcgctgcgaggcacgccaaaggggcgggccggaaacgactcaggaggtcacttatgaagaacttgcacgagcgcgcagtcgaggcagccatccgattcgtggagcgcaagggctacgaggtcttggaccggaactggagctgcgagggcgtggcgggccgcctggatctggtggccatggacgaggacgccatcgtcttcatcgacgtcaccgcggccaaccgcgaggagggcggcttcagcgaggggaacctcacccgcgagcagttcgagctgctggcagccacttggctggagggctacacccccgagggcgacgtcccggtccgcttcgacggcatcgacatgatcgtcgtcaacgccggcagggccctgctcaggcaccatatcaacaagctgggctcgttcgcggagtccatcgcgtagcggccggcccccggagcacggaggggccgcagccggcggctcctccccctccgtgctcccaactcgccgcggcacctcggctgcgagggacccgccctcgcgctcccgggcagcccggacccctgcacccctcccgccacgggtttccggcgcgcttgtgccggctccgcaatgccgcctggcccttccgccgggaaagcccgccgaaaggtgccgcatcgcgcatggggctgcgtgccccatgcccccgcccaaggggcacgcccccttgggaatcccatgcgcgtcctccgagccggacgggctcgcagcgctcaggcgccgcggggctgtcgcgcgcgaaggccccggctgcgccgcccacacgacatccccgcaaaacccggggaagggccctgcggaaaccgggtttggcggagatggcggctttcgccttcgtgaagccggctccaccggggccgccgcgcgcggatcggcatccaagcggatgcaagccgggcttgcatccgggcagggccggatcgggcgaaaagaagggaacgacgcagcatgagggcagcagccacaggaaacagggtcgggatgatcgcgcagccgtcgggcgcaagggccgcaacgaccgccgtcgcggcgcgaggcggcgccccgcgcgcgaagggcatcaagaccagggtcagctacgcgggcgagtgcagcctcgaggaggcggtgagccagtacctggccgccagggcgaactcgagggcgatcccggccctggccgaggccggcgcgtgacggacccgggaaaccggggcgcgttggacactttcgctgcccgccgacccgacgggcagcggcgcgcgccccgctgctagcatccgacccgtatcacagcgggcgcgaaaccgactaaggaggaagaccgtgagggtaatcaccgtaagcaacttcaagggcggcgtgggcaagaccacgaccgccgtcaacctggccacgctctgcgcgaggcacggaaagaggacgctgctgatcgacctggacccccaggcgtcggcgacggactacttcggcctctacgagcaggcggaggacggcgccaacgtcatcgggctgctctacaagggcatgaccgccgacgagatggcctacgacagcggaaccgacaacctgcgcgtcatcccggccacgctggcgctcatcaaccagaacgagctgctgcttgccgagcagtcgctgcgcttcgcgctggacgacgtggcgggcgaatacgacgtcgcgatcatcgacaccgcccccagcgcaaagcagctggtgctctgcgcctacgtggccaccagcgggcgcggcgacgtcatcatccccgtgaagcttgactccaccgtcatgcgcggcacggcctcggtggtggactcgctgcggctcgtggccaccaagctgcgcctgcccgtgcccagctggaggatcctgcggacctgcgtgcccggaaggatgaccaacgccgaggccgtgggcgaggcgatcctcgaccgcttcttccccgaccagcagttccgcaccgtgatccacgagtccgccaaggtgaaggagggcagctgggaatggaagcccatcgtggagttcatgcccggcaaccgcgccgccgtcgactacgggaacctggggagggagcttgggctatgggacgagtagacgacatcgccaagcgcttcagcctggcgggcgtgctcgacgaggacaggcaggcgaagcagaggttccccgtcgaggagatcgaggtggcggccatcgaggaccatccggcaaacgtcgcctactccatggacgaggacggcataaaaagcctcgcggagtccatcaggaaggacggcctcaccgacatccccatggtccgccgaaagccagacggcggcttccagatgctgtcgggacacaggcgcaaggcggcctacgcgctgcttgccaaggacgaccccgcgttcgggcgcatgccctgccgcatcgtcgagggcgtcagcgacgaccaggcggtcaccctcctgcacaccgcgaactacttcacccgagagctcaacgtcatcgagcgtgccaaggccacgcaggcgctcggcatccaggtagagcggatgcgcgccgagaacccagagctgaagggagtgcgcaccgcggagctgaaggcggcgatcatccgcaaccagacgggccgcaacgtcagccccgctaccatcaagcgccaggagcagaccgcgcgaagggtcgaacagggcctcaccgaggactggaggtccgaggcgatagagggaaacctctcggacaccgacatcgccacgctcgccgccatggaccccgatgcccaggcgaggctctacaaggagaaatcctccgcgaacgccggcaaggcggacacctccaagctgatccgcgaagccggcgggcccggggcagaggcggtcggcaagctcgtcgccaaggccctcaaaaccctgcgaaaagcggcgggtgcagccgacgggagtgccgtcgtcgacgcctcccagctcgacgagatcgagcgctgcgtgcgcgacctgcgcacgatcgcgggctcaaaatgagcccgcagacggaccggagccacgggctcattttgagcccgctggcaaatggccggaatctgagttccggccccttgggctagcaagctacctatcccgtatcacggatacgggatagcgcttgcggctgcggccccggcggagcgccgcggcggtgtctccgacctcctccccgcccgcggcattccgccggggccgcagccgcaacggacggcatggcgcgccgagaccgcggccggccgtcctcgtgcgggggatcccccgcgcccctggagacacgaaaccgacgaagggaggcaagtccatggactaccccgagatggtcagctgccgcatgacctccggcgacctcgaccggctcaccgcatcggcgcagcgcgccggcatggcccgctccgaatacctgcggaccctcatcaggatcccggcaagcgcctccggcaagggcgccgtctacgtcatcgacagccggaccatggccaagatgctctcagagctcatccgttggggccgccactacaaccaggcagtgcgcgccctgaacaccatcgcgctgtttatccggagggggagcccgcctgagtacggcacgttcggccagatgctgtcagaagccgaggagaagctcgaagaagtcgagcagggccgccaggtgatcgagtacgtgctggcggacatagccggctccacgagcgtaagcggtgactagcatgcccgttataaaacccatagccgggcacaccagcgttcgcggcgtctccgactacctccagaaggatggccgcgccctggccgtcgacctgtacaacctctcgtgggacgaggaccgagacgcggagcttgaccccgacctgaagcaggacgtcgactgggcggccgagatggacctcacccgcatcgccaacggcaacgacaccccatggcgcggcaagcgcgcgcggacctacatgcacttcatcgtctcccccgacccgaaggacaaggtgacgctctcgcagctgcgagagctgacgagggcctgggtccgcgagaactgggacgactacgagtgcgccgccgtgttccacgacgacaacgccaacgaggtcatgcacgcccacgtcgtagtcaacaacaccaacctcgccacgggcaaccgattccagaatcccgacccgcggaagatgcaggcctcgatccaacggctcgccgaaaagcgcggactgagcttcttcgtcgacgtctcagacgaagagaagcggcggtcggccacgaagggcggggccgctccgaagaccaggcaggccgtctacgtcaggagggccgagcgcgagatagccgggaagggcggctactcgtgggtggccgacatccgcaatcgcgtgacgatcgcgaagagggcggcggagacgccgggcgagtacctgcagatcctcggcttgatgggcatcgacgtcagcgaagcctcgaggaagggcggccgctcggattggctctactcgatggctgaaaccccatcgaaagggatccgcggggagaacctcggcctcgcctacgggcgcaaggccgtcgaaggcgccctgaagggcaacgcggcgatcgaccccggccaaatcgcggccatcgcagcgaaggcggtcgaggtaaaggactatgcgcagctggagagcatggcgacggcgctcgagctctgctcgaggtacggcatccgctgcatggccgacttcggcagccgcatcgcagctatggggcgcaggggcgacgacggggcgacgagcgagctgcgcctcgcaaaggagaccgccaaggagctgaggctgctgcccgatgcggccagggcaaggccccgaaccgccatggaccagtacgcccggcaaagacagcgcgccgacgcctccgcgcgcgcaggcgagcaggcggctcgccagcggcagatccagcaggagcagcagcgaagcgacaggaacaggagagcgagatgattctagagatgacgtactcggatggccaccacgagtgcttcgacagtaacagcctcaccggcggcgccgtgttcggcagggcgaacatcctcacggagttcgacgtcgtttgggaggagggcgaaggcgggcaacacctggtcgtctacgagcaccatatggaggaatcggcaccgagcgacgacgaggcgtcggcgaatgccgagcgaatccgcgggcccaggctcaagctcatcgactccagcgaggtgccgggcatcgagagcgtttccctggacggccggctcttaacctggtcccagggcgggtgcctggtggatgccgccaagttcgagctggcgtgcatgaagtggtactcaggccccatgggcgccggcgccaacgccaaggccgtcgcgctgttcaggtacctggagcgggcccgccccgagctcgccagcgacgaggccgagatatgcccgctgttcggctaccctgtcgccgccttcagggaggccgaggacgaggagatggcccaggcaggcggcgcggattgcggggagggaggtttcgatgaaatggattaagcgggccatcgtcgccgcgggggcgttcctcgtatggctattccgggccgtgttcagatggttcatgtgaggccgcgccggccagaaggccgcgattcgcagatataatcaaaatataagaggccaatgacaagcagggggcaaaatgaatggcaagcccgagcagacgagcgaaagcggcaatggatatcacgacaagccaaagctcaccattgcccagcagatagcccatctggaggcaaagggcgtcacattcgatagatatagcaaagagagggcggcagcctatctctcggacgagtgcgacttctatgagcttacgtcctacagaaagctgttcgccaagcgccaaggcgggaagcgcaacggagagtacgccaacctcgacttcgcccaactggtcatcttcgctgaactggacgagatgcttcgcgaggtcttgttcgttatgacgaggcacatcgagcactcctgcaaggtcgacttgaagcgcaacatctccgaacgcaacgacgaagacgggtacgccatcgtcgccgactacatggcctcgctcactccgaaaagcaggagctaccgcgaagccgagctcgagaggaacggcagaaacaagtacaccaaagccgtttacgagaaatacgagaagcgcatgccgtcttgggttttcctcgagctggtgccgttcggcacgctcgtcgacttcatccgattctgcggcgcacggtgggacgacaaggacttcgagcaatcccactacgacctaaagaaggtaaagtcggtgaggaactgcgcagcccacggctcgtgcatcataaacacgttcgctgagggcgcgaactcccggcgcaccacgtcgaggaagaccttggaagccgtagcgaagctggggctgtccaagccgacgagacagaaatggcttcgcaacgccgccgcgcaggagatcgccatcaccttggtgcgctacgcgcaagacgtccctagctgctcagccagaaagagagacgcggagaagctcaggggcttctttaacgcggtcgagggagccggcgaccttttgccaaaaacaggcccggacgcgacagcggcagccgcgataaacttcataagatccttgacaaagagccttggattgctagacttacggtagatcgcaaaaccttcgggttttaggggtgggatggtgaaagccaaactgccctatttttttgcccaaaatcaggcttatagggcaaaatcaaggacgcgcatcatcgcgatgcagcgccccggcgctcacctatcggacctgtcggggaggcgcggcgcgcggtcgtcgcgggcggacgccctcctggcgatggccgcgcgctcggacaggctcctgcaggctgcgtcaggcttgtgctcgatggcgcgaacgcgctcgagcccttctgtttcacggttctcggccatcttctgctccatgccgccgatgatgccatgggccgcgccgcgtatctcgtcgagcgaggccctcagctcggagaggttcttgccctcgctccacccggccacgtacccgaagctgtagtcgccggtgtcgagcccaagccagctcgagacgacgaaggcgacgctctcggcctggacctcgcgggtcgcgcggcccggcaaggcggtcccctcccccttcggctcgaaatcgtgcatgacgctgtgggcaagctcatggatggcggtcttgagggtctgcgcttgggacatgcccttctggatcacgatgcgcttgggctcggacctcgagaagaatcccttcgcgccgcccgggacatcctcgaacgaaacggggtacctgctgatctccgagacggcgcgcatggcggcctcgtatcgggcgacgccgcccgtcagctcgtcgacccccaaggtgggcagctcccttccctcggtctggctcacgtcgaacacggtggccaggcggaagcctgcgagcctgcgcctgggtccatccccggcgctgccgtcgcgcgcttcgccgacgtcgtcgccctcccctttcgccttgaccacgaccgggctgaggatcctcatgccgcgctcgcccttcctcacctgcctgccgaacttgtcttgccaggcccgatagcccgctaccagcgtcgcgtccgggcgttgcatcgcgatgagcaggcagttgttggcgctgtagctgtggaatcgcgacatgacggcaaggtagcggcgataccttgccgactcgaagacgcccctcacgccctcctcgaggcgctccatggtttgcctgagctcctcgtcgcgcttcgctgcggcctcggcgccgcctcttgccttgccttttgccatcgatctcgcctttcccgtgcagacttccatgattcacatcgcatgcgcgccgcgcttcgtgcgacgggcgcgcatcggcgccgaacgcgcccgcccctgcatcacccgaacgcgtcgacggcgcatatcaccaacgtgcgctcgttgccccagcggttgtagctgcaggtgcatagggtgacgacgcttttcacggacgagcagtcgaagccctctccgacgaggctcaggtcggcgtcggccacgacccgggcaagccattgcgcatgctcggcgtcgtcggcgaactccaccttggcgccctcgcgactggcatcgacgacgtcgaccgcaagcaccctcagcctggcgtcaccttccggagttcgcaggagaatcggggaatgcccctccgcgtaaccggcgcccgagaacctcgccaacgcggagaacatcgtgccgtcgtcgaggtggtggccgaacaccagggcgttgccggcgcccagcaggccatcatccgcgcacttccagtgcaggtagggcacgccgtggtagttccagccgccgtacgcgtcgtagcggaggtagtggtcggggtcgccctcatgggcctggacgatcgggtagtcgatgccggtacccggcacggtcacccatccgatgatgtctgggttgacgctctgccagtagccccagtcgacgcccccggagccgtcgttttcgccggccgcctcgtcttcggcgccaattgccgcgaccccgctcggatcggggtcgaagttggtcgccctctcggtcagccaagccatggacgacagtgcgcccacggcccccaagccgagcgccgcggcgaggacgagggcgatgcgcgacttggccttgcccttcatcgatgcccgccatcggagcacttgccgccgcttcctgtcttatccaacgcccccgcgacgtcctcgacgccgggttctcgggtggttccttccatggtttcctccatatccgcaaggaaggcggcccgaggccgccttcctgctttcgggcgagcgtcggccttaggcctcgtgctccgccgcttcctctccgcgcccgaggtcgtcggggtcgggatcgtcggggttgcgcctctgcagaccgtatgcagcgagcgccaatgccgccgcgagggccataccggcgcccagcatatagggcatgaggtccacgccggtcttgtccagcttctcgcctggcgcatcgggaacttcgggggtgtcggggttgtcgaccactaccgtctggccttcgtcgtcgacgtcctcgtggacggcgacgacgttgcccttggcatcgaggcagcgctcgaaggccacgagggccgctccctcctcgagatgggacgcgtcgaactcgaaggcgacctccacaacgccctcggccgcctcgggggcgaactcggcggtggcggtcacggggttgccgccggcgtcgaccagcgtctcgccggtcgacttgtcgacgagcgcaccgtttgcggtgtaggtttcgccagggacgaggcccttgtactccacggtgtcgacgagcttgaccttgccgctggcgacgatttggtcgccgtcttcggcgtcggtgagcttcgtgcctatctcgacgacggtgacggtttgcccctcgtcggaaaggtcctcgtgtgctgcgagctgcacgccggcggcgaagagcttctcgaacaccacgacgctcttaccgcccaagccggtgccgtcgaaggcgagctccaccgcctggacgccatcggcttcgtcgggggcgaacgttgcggtcccggcaacctgcttgccatcgacggtcacgggatcgccggcctcggcatccatcagcgcggcctcgagcgtgtactcgacgccgggggtcagcccctcgtatgcgacctcgtcgacgatggtgatttcggcaccggtgacgagtttgtcgccgtccgctttgtcggtcgccgtggtgccgatgcccacgaggcgaacggtctgcccctcatcgtcgatgtcggcatgggccgccacctccacgccgcccgacgtcagggattcgaaggccacgacgtcctcgcccgccagcaggctcccgtcgaaggcgaactgaagctccacctcgccggcgcgctgcttgggcctgaaggtcttgctcgcggtcacggggttgccgtcgacgccgacgagcgcctcgccggtggacttgagcataagggtgcccgtgacggtgtattcggtgccgtcggtcttgaggttctcgtaatacacggtgtctgacagggtgacttcgccagaggcttgagccacatggtcgccgtcggacgcgtccgtggcctcggtctggaccttgggcccctccttgtcatcgaggctcatccacaccgccttggcgacggaggagtcgcgctcgatgacgaacgccttcttgatcaggtcgtagccctcgttggagtcgctgcgcagctcctcgagcgtgtacctgccgaagggcagcgccgccagaccgtcgtcgacttcggcgacggagccgtcctcgccgagggagaaccacacgcccgccttggaatccatgtccgaggcgttgaccgctccgacgtccagcagccggtcgttgccgttggtgttggcgctgtgcttgttccaggaggatgccgtggagacgttgccgttgccgtcggtgacgaccacatgggcttcccctgtcgcctcgttggtaaccttgaaggcgacctgcagggactcgttggtgtcctcggccatcttcgctatctcgaggtcgttgcggacgacctggtcgaagaactcgagcgcggcgcctcccgaggaggcttttacgatggcgccgttctcgcgaatctggaacgtcttggcggctccgtcagtcagcaggtaagagtcgttgctcttggtctcctggatagcgtaggtgccgtagggcagcgcgtcggcggcggtctgcgcggtataggcgcccgcctcctcgttccacgccgtggtcacggtggccaccgtctcgccaggctcgaaccactcgccgctgaccagcaccttggacgccgactcgttggttatggtgaactcaatgtcggcgagcgtggagccacagcccggcgcaccgtgggagtcgccgcccagggcctcggacttgccgagctcactgtcggacttcgtgacctgcacaccgccgcgggcgacgtcgtccttgcaggcgccgcccgtcaggtcgacaacctcgccgttctccctaatctttgccgtcttcgaccaatccgaggcgaggtacccctcgggggcctgcgactcgacgaccttgtaggcgccgcacggcaggtcgcccgacccggtggcggccacgtacgccttcgccgcagcgtcccactcggcctcgatggttttcacgacctcgccgtcgccgtaggacctcccgccgaccagcgcgttcttcccggaggcgttgacgatgtcgaacctcgctccggcgaggttggcgtcgccctggggcgcgctgcctgcctgcgaatcttccttagcgaccttgaggcctcccttcttccaggtgaagctcacaagcacctgcgtcgcagagccggtcttcaccgagaaggcctcgaagcccgtggacacctcgtccgcgcggttcttcaccttggaccaggtgtcgccgaggagctcgtccttggcccacttctcgaactgcgcgttggtcccataggccgcctcgccgcgcgagccctggtaggcgaacgacagcagcacgtggctcgccaccaggtatttgtcctcgctccaacccgtgccgtcgtaccacctttccgggaacacggactcgtcgaagcccggcgcgccgtagctgaaccacatcgcggcggccaggtcgccgtcggagatgtccgacttagagtagatccccggcgcgggcgtgcccgccgcgggttcggcgcagtaggccacctcgccgtcggcccacatgcgcgtcgtgaagtagccggcgtaggggacgtcgtcgccgacggtcacctcgacggactcggaggcctgcgcctgcatgggcgccgatgcgcacataccgatgagcagagccacgctcatcatgactcgaacgatcttcgacaaggcggcggtctctgttgctctcgctgtcatggccgcctccttagaacgggatgtcgtcgtgcgccaggctctgccgacgcggctggtcatcctgcgcgcggccgagcgcgctgcgggtggccgcatcggcccggtcgtggaggcttcgctgcttcaaggaggcgaggtaatcctgccgctgctggtccaaggcgaagcgaacctgctccggcatgaccttgaccgtctcgcgcaccttgccgccatcggcgtccagcaccggcttcccgtcctcgccgagaacggtcttctgcagccacacctcgcggcccttcagcaacggaatgtcgcgatagtcctcccccttgcgcgactcgttcacgtacagcggggagaactcgaagaagctcacgtcccggccgtcgatcgacgtgcccctgggcatggttgccgagttgaacgtgcgttgttcgcccgtctcgcggtccgtgtaggggattccctccctcacgaagttcttgtggagcgtcacgtagacgctcttgctctcgttaggcatgcgcccttcctttcaaaaacggttcgggcgggccgtgcggcccgcctcgtcggacgggcggcgcgctcgcaggcagaaagccctccttcccggaaaaggtccgcgggcgcgccgccctaccccaagccgggaaaggcagcggtttggacaaggcgcgccgaaaaagggcggcacgggagtgccgcccttggcttctccgtgtggtcgggcctttcgaagcctcgcgccccacccctatccgcccatgacgtcgcgggcccaggccccgctcttcaccaggctgagtatcagcaggacgcagacggccaggtactgcagcgcatagctcaggcctccgacgacgctgtccatcggcgtgcccgtgccggcgttcacggcatcgagcccgcccagcaccacggggaagcttacgagaatcacgaggatgatgacgcccgccaggcacacgctggcgaagctgcgcagatacccgatgccgatctgcctggtgtcctccaggcccatgaggctcaacggtatggggctgaacgccgccatcaggtagagttggatggcgcgggcccagctcaccacaagcgccacgatataggccaccagcaccacgacccagctgaccagcgccaccaccgccatgcccaaaagcgccggcacatcgtcgtcggtggtggtgatggacaccttgcccatgtcgagctccgcgccgttgccgaagaggtccgtcacccgctggatggcgatgcgcgtcacctcgtagagcgcctgcatgagctcgaaggagtgctgcaccaggaacaggaacacggcgaagaacaccagcaggaagacgacctccttcaccgccggcatgctggagctgccgtccatgcgctggctgatcttgatgagctgcacggtgaacacgaaggagagcaccccgcagccgattggcaggatggcgctctcccacacgccgtgaacgatgtcgtacatgctcacggtgccggagccgcccagcatggtctcgaagctggcggagagcacgccctcggcgccgatggacctgagcacgtccacttgggctccgaagatccagttgcagaagtcccgcagcatgccgcaaagccacgagttgacggtgtcggcgatgtcggcgtgcgcaggctgcggcagccagagcatcgccgcgcagaagagcgcgctgcccgcgagcgagagcaggaacctccgctgcgccagcgtcgcccgtccgattctctcaagcaaagcgaccccctagcccgacacggtgaacttgccgtcggcgtacgccaccacgaggacggtcctcgcggggtcatcggcatggaacgacgccgagacggtcttggcgttgaagtcgacggacgcctcgccgtcgaaggaggccgacgccgcctggggcacattcttggccatgtaggccgccagggccttgcgcagcggctccgcgtcgccgccgacgaggcctatgtatgcctcgtccatcccgctgacggatacggagccctcggcaacgtcctccgaatacttcttgctcaccttgaagtcgtcgctggacatggttgccgcgccgccggaccggtcgaaaatcagcgtccagatgacgctgtcctgcgaatcctcgtcggtgccggcgaccgtgaacacggcctgcttgccggcgtccgcctcctccacctcggaaacggtcagcacgtggatcttgccgtccgcccccttctcgatgaccatgcccttggacatctgcagcgagcccgcgtcgctcttccagcccttggagcaggcgagctcgtaggacgtgagcgccgcgggcgcctcggcgccctggccttgagcggcctcctcggcgggcgcctcctcctgcacggtctgctggtccgtccccgccgagcgcagggcgcagctcgcgaccgacagcgcgatcccgatggccagcgcgcccgccgcgatggcggccaatgccttcgtcttcttctccatttcgaaatctccttatccggtgtatcggagggcgcaggtgaagtacgagatccccgtcgccttcctgcacacgtcgcccgtgcgcggttcgtgtatgtactcgtcgcctcccacgtagatggccacgtggccgtacttgtagaggatgtcgcccggccgcgcctgcgacagcggtacgacggtgagctccttgagctggtcttccgtgtaatggctgatgcttatgcccgcctgccggtagcagtactgggtgaggccgctgcagtccaaccccacgccgggcgtcgagccgccccaggcatagggcacgcccagctggctgtaggcagcctgcacgatggcgtcgccgccggccgcgcccttctcgaagtcgtcgacgcccatgccgtcgaaacggtacaggttgtaggtcctcatgaccgacttcaggctctccacgtactccgagctcgtggcgtagcccgcgtccttcaggccctcggccatcttgtccgagtcatggtcggcgatggcctccttgatgaacgcgttgtccgcatagcggctgttctgcaggaaaaccctgctcctgaacctgatgcagtccgcgtcgctcttgaacacggtgaagtcggccatgaccgtgacgacctggccgcccacctcctcgtgggtggcccagctcgccttgccggcgacctccgggcagctggcgaagctcgatgcccacttgatgccgaagaggttgtggtccctggtggccagctggctcatggcgtcgccctggccgctctcgcagatgacctgcgcgatggtgcagcctgcgggatgcccgtactcctcctggcactccagcgcctcgagcaccatgtcgtaggtgatgaagccgggaaggccctcaatcatggccttgtcctgctcgtcttgccagaagccggcgattgcgcccaggagcgtcgagaggatgaggctcgctgctacgaaggcggcgacgcccgccaggaccccgcccagaacgggcgcagcggtcgagacggccgccgcgagccttccgccgaatccggccttcgctgcggcgggccccgcctcggcggcctgcagggcggcgcgcgacctggcatagttggacgcggcccgggcctcgcccagggagctgccgccggcagcctttccgccggtggcggcagatcggcgggcggccttgccgccaaggccttccctggcccttgccagcagggatttcgagcggggcgcgctttctgcggaaccgcccggcccggcaacggccctggcttccccggcggcgcgcttcgcctcctttgccgcgacggcatcggcgttggcggtatcctccacaggagcgaacgggtcggactcgagccttgccctgcgccgcttccggatgtccgcagccgcccttcctgcgcggtaggcgccttcggacccggagagctcgtcgctgtcgtcgagctccccgacgaagccggccgcgatggcgctcccggccctgccggcgaacccgcctttggccacggcggcgtcgggggcgccatcggccgctccgcaaacgtcgctcttgccgccctcggcgaaggagccttggtcgggccccttgaacgtgccgccgcccccgctctcgaacctggcgttgccggcctccaccgactccgcgctggcgaagccctgcctgcgggcgtcgggccccctacccgacatcgcccgccgcctcggcctcgtcggcgccggccgcaaactctgccgcgcgcttggcgaagtaggcggcgcgcttgcgctcggcgatctcatcgggcttggtgttgaacaggtcgtagagcgcgcccttggggaagtcgtccacgataggcacgcgggacccgcccgctatgagcaggccgtcgccggggttgaccgactcgtcgatgtagccctcctcctgctccgagaggttcagcagctccgaccacttggccttgtcggcgaacgactgcctgtgcagcatgaggaagtcggagttcaggatcaggttgcggccgtccttgtggctcagcaggtaggtgcagttctgggtgatgccggtgcagatcaggttgaacttgcgcccctccgcccagaaccggctgaagtagctgatggtggcggggtgcccgaagaggctctggacctcgtcgatgtagagccaggtcgtcacgccgcgctcgaagttcgcgtacatgcggttgcgcaccgcttccagcaccgcgatgatgccgaaggcgcgcatgttgtcgggcaggtctttgagccccacgcaggtgatgcgcctgtcgaaggcgacgttgctctggtggttgaagatggagagggccccggagacgtatcgctcgaaccgcagcgcgacgatctcggcctcgggctccggctgctgcctcagaatgtcgtaaaggtcctgcagctgcgggacggctccgctcttgccgcaggtcaggtacgccttctccacgcagcggctgatgatcgagcgctcaacgtccgagaggccctcgttgccctccgccatggacgcggcggacagcgctagcaccgcctcgatcttataggcaagctgggtcgtctccaaaagctcggagacgtcgcttaggtcgagcgggttcaggtacgtctcggagtccgggccgaacgccacgttgcggccgccgaaggcctcggccagcaggccgaactcgccggcggggtcgatggtgacgacgtcgtcctcggggtagagcagcgccgtgttggtcatctcgcgcttggcgccgaaggacttgccgctgcccggcatgccgctaatgatgccgtttcggctggccagtcccttgcggttgagcatcaccaggttgcggctgcccttgttctgtccgtagtagccgcccccgaagtcgttcagctccaaggtggcgaagggggactggatggctatctcgtcggtgagcatcaagcgccccaccttcacgtggttgcgccccagcggcagcacggagttcagcccctcgcgctgccggtagtctaggttcgcgagctctatgccctgcgcctgcgccaccgatatcaggtgcatcgcctgctcgtccagctcctcgcgggtgggggcgtaggtgaacaccagccccgtgtagcggaacatccgctggctgtcgcccttcaggcactcgtagacgtcctgggcctcctcgcgggtgaacttcagctcgctggggatgaggttgaagtcgtagcccttgctcacggcgtccatctggtcctcggacatctccttgtcgatccacttcaagcggcggcggacgtagtccttggaccaacgcgggttcatggccttcacgtggaagctgatggccaacggcatgggaaggtccaccatgtccgccaggcagcggtcggtcaggttgctctcgaagctgcggaacgccagcacctggcaccacacgccgtcgctggtgaagcagctggccgagccgccgggcttgaactccatggtgtcggggcacgccaggtcctttgccgtgatcccgcgggtgacgcccagctcgtcgtagccgaactcgacgcgctcgcgccccggccgcgtcatcgaccgtatcagctgcaggcgttcctcgccccgcagcacgcgggtgccgctgcgcatgcccgaaagcacgccgtccgccatggagcgcaggcgcgccagcttgggcacggactcctccaccgtgtcggcggagacggagaacgtcaggtagcgctcgcgcatgatgttggacacgccctcggccatcttgtcgttgaggatgctgctgtactcggcggcgtagggagcggcgggcccctccacgcggccgaagaacctgcggttcgacatctcgcccttggtgagcgggcggttgaacagcaggagctgcagccccacgtccggcgtcaggccgtcgtagagcttccgcatctggcggcacaccgacttctgcgactcgtctcccatgctctggtagctgatgtcgccgaagctgaccgtctggctgaacagccccggctccacctgcgcgatgccgtcggcgtacagggcgtcgaagccgatgagcctgtagacgtccttggctgcgcggcgggccctctcggccgcgccctcgacggcggcgcgctcgcgctgctggttcttgagccgcttctcgatcgggacgtacctgccgccctgacgcccggggatcgccgccctcttgcttttcctggcgcgcttcgcggccgccttggcctctctgtcggcggccttcaccgcggccttggcgtccttgacggcccgcttggcggcggcgacgtcctccttaccggcctttcgaggactcatagcgctctcctcccttccgccagcccctggccagcctgttccgatctttgaatctcctgcatttctcgtcgggccatgcgtccgcggccagggagaacccgggctcgtaggtgacgacgccgtcctcggcccaatgccggtatgccagcgggacgaattcctcgggcttcatgcccttgggcctccagaaggccgccagccagaacggcatcgagcacatcatcacgggcatggtggcatctgccacctccaccccgacgaccaggtgcgcgaaggcggcggccgccacgctggccgcgatgccgccgcctacgcaggcggccacgcgggcggagagcttgccgacgaccttctcctcgtactcgctgatgtccttgtgcacgtagaccacctgcatgggcgccccctagttgggcatccacgaggtgtccagctggccgaagtacacggcagccgcgatgatgatggccccgcccgcgatggtggagatggcccccgcgatctgcgcgccgccgcgggtctcgtccttaatggccagccccaggctcaccgccccccagacgaccacaaagccgcccaggaaggtgatgcacccggagaccaggctgatgatgttcgatagcatatggattcccttctgtcgtgtgccgcccgcatcgggcagctgcctgcgttgcgctcggttctaggaggaggtcgcttcctgctgctgccgcctcctctcctgcaggtacgccccgtagtcgaatcgcccggggtacctgctgcccggatgccccgccagcagctcgtatcgcgggtgcctctgcgtggggtacttggagtcgcgcagcggcgcggcgttgctgaacagcacgagcgccctatccctgcccatgcggccaacctcggaggcctgcatcagatcgcgctcgatgtagctggtgttggtggtggtcgagccgccgttgccgcggctcacgttctgcgtgttgacctcgacggtctccttgccgatcatctcggagatcatcttctgggtgtccacgctcttgccgcccaggtagagcagcgtgtcgcagttgtccacgatggtctgcgcatcgtcgccgtaggcgctcttgagctgggcgaagctctgcaggatgatggacatgtagacgttgcggctgcggatgaccgagaccacgtgctcgatgtccggcagcctgcccacgttggcgaactcgtcgcagatgaaatgcacggggcgcgccagggagccgccgggcagcgcgtccgccttgtcgcagagcatgttcaccgtctgccacagcgtgatggccagcatgaagctgaaggtggaggacgtgtcggagctcaccacgaagaccgcgcgcttgccgcccgcgtcgcccaacttcgagagctccagctcgtcgtggtcggtgaggttgcgcagctgcggcacggagaagggcatgagccgcgtgttgcagctgatgaggatgcccttcatggtcttgccggcggcgtccttgaaggccttgtagcaccacagcacgaagtcgtcgtccaagcccaccggctcgccgacctgcacccatctgaagcccgaggacgcctggcggccgaacgcgcggcccggcttcctcgcgccgtcgcccgccggcgcgccgcccgtctccaccaggcgcatgcccgtctcgatctccctgaacagcaggtccagcgggctcgtgtagtcatcgtcgtcctccctggcctgcgccagcgagagcagcgtgacgagcccgccgaagttgcggtcctcgggcgggcagtagaacataaggtagccgatgagggcggtgtagagcagccgctcggcctgcacccagaactggtctccgacgtggtccttgtcgccggtggtgttggcgatgaagcactccgcgaactcgatgatccccacctcgtcgcggatgagcgagaaggggttcacgccggcggaggccgacatgcgcaccaggttcatgcagctgatctcgtagccgctccccaccagcgcgttgccgagcagcggcagctgcgtgcccttcgagtcgatgacgaagtagtccgcgttcatctgcaggatgttgggtatggagtacctccaggtcttgccggcgccggtgcccccgatgacgaggacgtttcggggccgctcctccagcctcttacccctgcgcttgccggggtcgaccgcgagcccgtagttctcggtgaggatgacgttgttgaagggatcctcggtgtccgcgaacctcaggccctccgccttggtgccccaacgcgcggagccgtgctcttcgccgattcggcggttgccctgcgatcgcaccaggtaggcccatgcaagccacaccgcgaggaagcagatggatccgccgagcagggcgttcggctcggcggagatgccctgcgtcgccaagacggacggcacggcctccatggccgctccgacgttctgcagccaaggcccctccatggagcggagcgctgccgcccagaggtcgcccaacgcgaaggccgcgacggagagcaggccggcggcaatgaggccttctttcgaatagcccttcatcggccctgggtcctctccctgttgaacgttctctccctatcgggaacctcgtgggcgttcttgcgcagctcctcggcggcggccttggccatctcggccttgtcggcgagtctctcgttcgcgccggtcctcgcatgatcgccgtgcgcgcggtccttgcccaggtcccgtgcgcgctcccttgcccttgcgaactccgccgcaagctccgccgaggccttctccttggcggcgtctaccgcccgggacatctcgtcgaaagccctcaccaacgacggcgcgtcctccgccctgaacagcaggtaggtcttgccctgggcctccttgtgccagtcgtgcgcgatgccgcagtcgtccagcttgccgtcgatgatgtcctgcagcgtcggccagccctcgacggaggtgaactcgtgcatgtcgagcttcgcccatcgcgcgggacctcccgcctcccgcccgccggcttccacgccggcggcctcgcggccctgggcgcccgcgcccttgcgcgcgttgtccagcgccgccttgagcttgtccgccgctgccatggccgccgaccctccggcgtcctggcccatacgcaagatccagtcgaagagcttctcgcccgagtagtcgccgaaatcgtccgccatctcgaaatcctttcttcccgtttacctgacgccgtcgaggatccgccgcaccgcggcgcggttctcctccgccttcgccgccctgaagctgggcccgtcgaatatcaccggctggcaccgctccagcacgcggtcgtatatgcgcgtgcgggcgagccccctggggcgcttcagctgcgcgagcggtatgttggtggtgacaaccaacggcctaccgctgcggtagcacgcgtcaaccaggtcgaaggctctggaatccatgtaggacgagtcccgctcggcgcccaggtcgtcgatgaccaccaagtcgtaggagcgaatgccctcaagcacgcgcgtccgctcatcgcccttggcgtcccagagcacgttttccgcccgggagacgctggtcacgagcggcaccttgccgtcgtgcatcacgaagttggccaggcagcccgcggcgaaggttttgcccgtgcccggaggcccgatcagcaccagcccatggccgccctcctccatctgctcccaatggcgggcgtactcgcgcacgatgcggaagccccgcctgtcgtcgcgccccagcccgaactcgtgcccgggatccaggggaaggcagagcttgtgcgaaggcgatccctccacggacctgacgtgggccgcggccctgcgcgcggcatcgagtcggtcggcctcctcgacctggcacctgcacatcacgggcatgatcgccgtctggccgccccaatccacgcgcacctgcttcccgtcgccgcacttgccgcagcgcagcagcccgtcgtcgccgacgaagtcgccctcgtcgatctcgcagctgacggggatcgggtccatggccgaggacttgcccgccctcacaggacatcacctgccacgcaggcgtactccggcaagtcgcgcctcgcacgcggccccgcgccctttgatgggtacgtgtttgataggtctttacttgatttctctttacttaattgcctcgggttcgccaacgcaggccgttcctgcgcagggggaacctgcattggaaaacccaacgcaggctcgtcggactctggcagcgagggcctggcgacggcgcgctcgtgcacaacgtactcggtgccggctaggcggccgaagccgtcgcgcaggcgccgccgctcgaggtagccgtgctcctcgagctcgcgtatgccggtgcggatggcgtcgacgccctcgcggtttatgcgggacaggccctcgagcgagtagtcccactcctcgggcaggctcagcatctgcgagagcagccccttggcctttagcgacaggtcgcggttgcgcaaatgctcgttggacatcaccgtgtagttggcgttcttctcgacgcggaacaccgtcacgacggatcgcccccgcgaaagccgctgggcgccggcggaagcatcgcggcctcctcggcgcgcgagcactccgacgacgtcctcagcaccgcccacgccgcaagcgccatggcggccgacgccgcccccagtgcgtagcccgcggcgagccacaagagagccgttcccatatctgcgcctttcctcgttggtttccctgggtttccccaaccaaagggcgcgtccgcgcaagttttggacatcggatgggcgcaagcgggcgaacgggcggcgccgcgccagcccgtcggcaaaggaaatgctggagaaaatcgggaatggcccaaggtgcgcgccagcgctatcgcctcgcaatgcgcagctgagggccatcgggcgacgctggcgagctgctgacgagtttgccgcaggctcggaagcactgcgctcctcagccacaggctttgaggagcgcagttgtcctgccccttgacgccttctggccaagggcgtggctatttggacaatgcggagatgacgatcagcgcatcacgacctccaggcgcgggccttcatgcaccagcaccttctcgacgatgcgcctgagcagcgccctatcgacgtcgtcaagccgatgttcctccagcgcgcagagaagcgccgcccgctccttctcgccgtcggcatcgagcagccggtccgcgccggacggaagcagcgaggtcggcgcgacggcatgctgcggctcggccgccgccggcgagccgaggacctcgaggtcggcggcggtcgccttcccgaaggcgtagcgctcgtaggccgcgagcttcgccgccgccgtgacgcggggcttcggcctccggtcgggttcatgctcggcgcaaggccgcggcaccgaaccgccttccctcatagctgctgcgatggcgtctgcgacctcatcctccgtcacccgccgcctgtcgccgccggcgcagtcgcacttgcaggtgaaggcgccgcccgccttccatgcgcggtagctgagcgagtgcccgcactcggcccgcctgagaagcccgcgcgcgaacgggcttttcggcgcggacttccccactcccttgaggtgctccctggtcctgaggcacgcctgcgcggcccgccagagcccgtctccgaccaacgcgggatgcgcgccctcggtgacgtagcgctccgattcaggcaccacgtcgaccggatgcctgttcatgacgcgcctacgcgtcttgccggtcacgagcgtccccgtgtacaccgggtcgcccacgatcttctgcacctgcgtgccggtccagcggcggctcttcggctcggggcgcttgccgtacccgtacagcccgagcctgcggtacgccacgcccggcgtctcgatgccgtcggcgtcgagcgccgcggcgacgagcttcggatcggcaagctcggccgcgagctcgaacagcctgcgcacgccgggggcgaagcgctcgtccggtgccagcctcatgcggtcggctgggtccaccatgtagccgaacggcggcgtggggtgcggccgtagccctcgccgccacttcgtctggagcgcgctgcgcacgcggatcgacgtgtcccggcagtaggcggcgttggctatgttgcgtatggctatgcccggcgccgccgagtcgaggctgcacgcggccgagtcatagctctcggcgatgctcacgaacctcacgcgcaggaaagggaagacctgctcgatgtaggtgccggcgtcgatgtactccctggcgaagcggctcaaatccttcacgattatgcaggagacgcgcccctccttgcacagggcgagcatgcgctggacctcgggccgatcgaagctcgacccgctgaagccgtcgtcgacgaactcctcgacgggctggcaggaaagccccgggtcgcgttcgacgaaggaacgcaagatggcccgctggttggcgatggaattgctcaccgcgccctcgccctccaggtcgccgtcggccctcgagagcctcatgtacagcgcgatcatgcgagcctccgctctatagaagccaccctgtcgcgccagtcaccgaacctgaactcgatcacgatgccgccgtcgcggcccacctctatgcgcctcaccagcgccagcaccaggtcgcggctgaacgtgaacaggtcctccagcgccgcgaccgcctcctcgaacgcgacgtctgaggcgagcagcgcgtcgaagtcctcgagttcgcggttggccgcttcgagcgcggcccggcaatcggccgccctcccgtcggcctcggcctgcatctccttgtactcggccagcgtcacgccgccgcatgcgtacagctcgtagagccgctgccgctcgcgcgacaacgcggcggcccgcgcggccagcgcgtcgacagacgcctgcagccgcctcctctcctcgaccgctccctcgctgcccctgagcccgggaagcacccggtcgagctccagcgccgtcgagacctgaaccctgacctcgtccatgatggctatgcgcagcgcgcgctcggcgacgcgcacgtcgttgccgcaaccgcgcccatggtgccgccggcacttgtacacgctgccccgggcctcccccgtcttcgggttgaacctgcggtcgaggatcatgcggccgccgcactcggcgcagaacaacacgcccgccagctcgtcgggcatggcgttgcggtcggcctccttggccgccacctgcgcccgcttcgccgccttctgggcgcgccgcttggcgcggacgcggccgaacacctcggccgacacgagcgccgggtgcgcatcggggaagaccaagcgctcgccctcgggcaccgtgtgcgcgggaatcccgtcgtaaagcgaccggtaggtgttgccgagcacgagcgtgccgacgtagacggggttgtcgagcatcttggcgacgtagcgcgccgaccacggtctgtcgcgccacgcgcccgcgtagcccgccgacgactgggcgtccaggtggtcgacgggcgttggcgcgcccatttccgcaagcgccgccgcgatgtcgaccagccgctcgccgtcgaggaacatggagaaggccagcggcacgaacggcgcggtggcgtcgtcgacgtcgagcctgccctcgccgcgcaccacgtggtagccgtagcacgtgttgccgtagatgacctccccctcctccatctgacggtgcttcaccgccgacaccttgcgggacgtctccaccgcgtacatctcgttgaccagccccttgaagggcacgacgatgccgccgtcgccctgcagcgtgtcgagcccgtcgttcaccgcgacgaagcgcacgcccagaaacgggaagatgcgctccaggtaggtgctcgtctcgtacatgttgcgcccgaagcggctcagatccttcacggcgatgcagtcgacggcgcctgcgcgcacctcatccatgagcgcgtcgaacgcggccctgccctcgaacatggtgcctgtgcggccgttgtcctcgtagacgccgaccacctccacgccctccatgcccgacaagctgtcgcgcacgaaatcgacctgggcccgcaggctgctgtcgcctgccagcccgttgttcctacagctcagccgcgcgtagacggcgcacctccataccttggccgcgggcgctgcgggaaccgccgcgacgcttgccgccgctttcctcgacttcctagccacggcagggcctccttccctcggccttagtcgggcaggcatagcggttgcgcgcaagcccctcgttggcctcctcgaacagctcccggccgaccagcgccgggtggtgtccctcgataacggggaacgacccaatcgggatgccgcttttgcgcatgcggatgctggcaaggcgctcgggggcgaagtcgcccgtgtagaaggggttggtcaccatgctcctgatggcggcataatcccagccttcaatggcatgccgattgtggccgtagagctcgttggccctctgcctgggcccggggcacccaagctcgcgcacctggccctccagcttgctgcgccaccagcgcccctgggcggcaagctcgaagattctggggacgaaggccgccacctcgccgtccacgcgcacgccgcagggcgcgtcctcgtcgaagacgtagccgaagggaacgttgcgccttataagcccgccggaggcgagcctgtcgtgctcggcatgcagggccagtgcgtcggacatctctgtctgcagccccttgaagtacgcccgcacgtcgccgccctgcgtgtcgaagccgcgcgcacagtccacgaagcggaatcccatgggcaccagcacctcctcgacgtagaagcgggcctccgagaagcacggcgcgaacaccgctatgtcgggcacgaccacgcagtcggccctgcggttctcgatgacgcgcatgagctcatcgaaggcggcgcgcacgttgcgcacggcgctgcggttcctgatggtctccgccttgcgcgcgtcgccgtgggcggaaagccacgccttgcacgccgccgactgcgccggcatatcgggggcgcgaagccaaccgctcatccagtcataggcggaaaggtacacgacgcagcgccatctgccgtcctcgcgcgccccggggataccgcgcgccgccgccagcacgtcggagaggtcgaagcccgccatcacgccaccccctcttgcctcgtggcgcatgcggcgacggggccaccgaaccggaagaccacctcgatgtcgccgccctcgccgacgagcaccctgtcgatgagctctacgaccatcacgcgctcgaggccctcggcgtcgcgataacgcgccaaggtttgctcccaggtctccgcgtgcacgtcatccagctgggccgtttcccgctcgatgccggccttctcgcccttcagctcctgcagcctgacgtcgacagcccgggcgagctcggcgtactgagccttgtcgataacgcccgctgcgtaatcggagtacatgcgcagccgcaagtcgccgttgtgctcgatgcgcccctccaccgactccaggcggcaggcgagctcggcgcgcctgtcgtggcggtacgcctcggcactcctcacgacgccatcgccgtcgaccgccgcgagggcgtgtccgtgcacggcccgcatcaccgccgccgaaagctcgtcctcccacaccttgtgcatgccgcactcggcgcggttcttcctatgggtctcgcaggagtagtagaagcgcttgccgctggagcagcggctcgcatgccgcgccatcgtcgcgccgcaatccgcgcagaaaaggaaccccgacagcggcagcgaccgcttggcgccgggcgacaggcgcatgtcgcgccgcgccagcttgcgcaccaggccgaaggtggccgggtccactatcgcctcgtgcgcgccgggcgaacggtcccactcggactcgtcgacggagagcaccgccttgcgccggaaatcgggcttgcaggtcttgccctgcacgagcgtgcccgcataggtctcgttcgacaggatgcgcagcaccgtgcgcgcgtcccaggcggtcctctcccccttgcagaagttcgagctgcgcgccgcgccctttgccgcgaaatactcgtaggggcttggcacaaggctctcattgagcatggcggctatgccggcggcgctcatgccgccgatgcgcgcgtcgaagatgccgcgcacaacgccggcgggttccgggtcgatcacaagcctgccgcggtcggggcccgaccccttggcgtagccgtagggggcgaaggcgccaacgaactcgccgcggcggcgcttggcggaaagcgacgccttggtcttggcggaggcgtcgcggcagtacatgtcgttgaagaggttcttcaccggcagcatcagcgcgtcggccggcgtcttctcggctgcggagtcgtagccgtcggtgatggccaccacgcgcacgccgagcgccgggaacacctggtccaggtagcgcgacacgtccaggtagttgcggccgaggcggctcaggtccttgaccacgatgcagtcgaccttgccggtctccacgtcggcgagaaggctgccccatccggggcggttctcgaaggtggagcccgagaagccgtcgtcggaatactcggcgacgatgctcaggcctccgttcgcgtcggcgaagtcgcggatcatggcgtgctggttgagcaccgagccgctggtgccgtagctctcgtcgtcgacggagagcctggcgtagctggcggcgcgatagaccctggccgctgtttttggcgttttggttttgggcatgaaaaggcctccttttgcacgtgcttgtacgtgcgccaggaggctctgaggatgccctcgggatgcgctgcgcttcccgccaagaaaaaacaaccgacgccgagggcccttgtatgcgtctggcgcaatcgtaccacgccttcggcgactcggcgccggcgaaggcggaaatctcaaggttgatggagcgttggccgatgccggccgaatcgcgtcacgcaggcccgtcgcctatgacgtcgcgcacgttctcgcgcgcggccaggtagcgcgacacagcttcctcgatgctgcactccccggcgtaggacacgcgcacgccgattgatccgcatcgtgcgcaaggctcatcgcaagccgctgcagaagcatcctgccgaagctcgcgcggcagcgcggcagtagtcgccgcttcgttcagctcgctggcaacaagcggctcgtcgccatcgcgatggagcatctcgccctgcacggcttccacctgttcatttctcatcgcgaccgccaatcccgaacatggcctcgagctcggcgcgcgtctcgtcgtcgagcccctccaattcctcgaggacgatctccttgatgacggggtacgagcgcgccaggcgcttgtaaatcgcgtagacggtgacgtactcctcctcgctgtgctgcttgacggtcttgccttcgaagtagattgcgcggatggtaccctggctggactcgctcagaaaggatatcgcccagtccagtatgctgcgcatgagcgagtgcaattcgtcctcgtggacgcgctcctgctcggaggcggggctgcggtcgtctgcgaacagttcctcggggttcatcgccccctccccgtcgctccgcatgagctggctaaacagtatcgggcgcatggtgacgcccttgatcttgacgatgcagtcatagctgctgcggcagcttcgcgatgagggcatgtttcctcccctgggtcagggagcgcgggattgcgctcctgcccagaggcggagaacgaagtattttggacgtgccctaagggcgagcggtggccacgacgaaagagggccttttgacgattgtcacccccagtagttaacggccgttaaccagcagcgaataatccgcccaaagaccaagaaaccccgcaactcggcttgagttgcggggcaagtaaacactagaggtcgaagtcgatcaataggggctgatacttaaagcagctgccttaagtatcagcccaatcttcgcaatcggtcacataatatcggatgaaatgaggccttctcgacattgcggaacccgatatagcatgagccacacggcctcacgctccaaaactcatcaagagcgaacgcgcctccgtcccctattcacccagctcagcgccccttaacgcagtctttcagcttctcgctgataacctccatagcggcatcgtaggcatcggatagctccctcatcgaatcgaacagctgagtacgagtccttgagccgaaagtgacgttatgagccttctggcgaaataacgagagggcttttgccagctcgacatcatcgatcctgcacgaaagcaacaggatgtcctccagtgactggcgctgcatttccgagtccgcaggatcaacaatccaatccgcccattccttcccctcggtagcaagcttatccatctgaaggcagcatttccccgtggccctcataccgcgctgaacagcttcttgcagccccaccagattctcgcgttcgaagcgcctccactcatcctcgcgagaggcatcgagcctcttgtcctcgagcttgttctggtgccttgccgtcatataagtcgcaaatagcgtcacggctccgccgataagcgtgccgacaagcgacgggagccctggagtcaaggcgtccagaacggcacttaggctgcaggagtccaacgcagaatcctttcttcgagagcctacatattcgcaagcatatcgttaatggcgcttccgaactcagcatctttctcggcgcgctcgagctcggcgcggcgccttgccagctcttccccatgctcgcgttgcctttcacacctcaccacagttcaacgttgcgataggtcaagggatctatgtcgatggccgggccgtcggccatcctggcgacctcctggacaacaccttcaacattgaacttcgttcgcccaacccctctaaaacgaattccaaacagcaactattgcccagatggcttttaggcgcctaccccaacttaatactcttggcaccaaccctgaatacgacaaccgtcatcatcacattgagcgctatctgcgatattgttgtggcaattgaagtaccgatgccgccgtacagaggtatcagaagatagttgcccacaaggttgatagcaagggagataagcgctatggcaaattgaagaccatagcgattcagcgacatgatgagcgcggacgccggcgcaaagacataggccgaaaatgcgttgatgcacagtatttgaaacattggtatagatgcatcgtatccatcaccgttcaaaacagggaaaacaagctgagccccgacacagcaaattgcaaccaaagccacgaatggcacggtagtcttcttgaaccacttgatagcaaactcgcgctgtttctcggtactctcggtcatctccgccttggacatcctaacgcgaaggacggtcttaatggaaggcaggaagagcagcaccatgttaaagtacttcgatgcaacgccgaactcggcgaccgcctgggtagacccaaaggacgccagcatagtgatattcgcctggttgtacaattgcgtggcaacgctatagagaatcaaccaagcagaaacagccaggaactccctaccagccttgaagtcaaccgcgatagccgcatcgccgtgcctaacaagcttccctatcatagtaagcgaaatcacaaaacaggctaatcccgaaaagcagtacgatgcaagaatgctctccaacgaacccgccgccaatacaaccgcaagcgcaatgcaggcgagcagggtcaactgcttcgcattctcgacaacaccggacttagcatagagttcacgggattggaagaaggcgatattcagctgcacagtacccagcaaaaagccgtaaacgatagcggccagcatgactggatgggcgactcccatagcttcagccatagggtaagacccgacaagaagaaggacaaggcaagctacgttaatcgcatgcgaaataaaaataagtgaatcgcggtatgcacgatccttggtcatcctctcggtattgtagcgaacataggcaagcgcgatactttgcccggcaatccctaaaatagtcgacgaagttgtgaagaacacagtgtagcttgcgtaatcctcaactgaaagtatccgtaccaatgcgacggtcacaaccagctgtagcgcccttgcggccatgttaaacatagtcacaaccgaaaagtcccgcggtataacctgcttaatcttcaagattaatcctccgaagtccctagaagggagcagacgaaaacaacaaagaacgaggtgaacgcaattgaatacagaatgcccaatgaccagccaatcgccgtgtaaatgaccagcaacacaacggccaaagcgttctttcttttgaacgccagccaaagggaacaaattagacctagaacaaaggggataaatccaaccagtccattctcgcaaagaacctgcacatagacattatgtgggttcgttccgtgaagaccggagttggccggcatgccaagcgaagcctcgtaaatagcgtactgcccggtgccgatgccaaaaacgggagagttgccaaactgctctatcgccagttgcctcttgatatctcgacttgaaacgatatcttgaaacgtcagggaatcgatcatcgactgtccgagcggactagcaacgacggcaacgacggcaatcatcaaacagagcaggagtgcctttttctcaagcgagacatcacgagtcttagccagcatcaggtaagcgccaacgattaccagcagataatagaaagttctcgcaccggtgacaacgccagcaaccatgcacagcaaaattacaatgatgcgcacaggcgctttaagccgcgtggcacccaaagccaaaaccgcaatagtcacattgctaaacagagcagaaatgatcgagtcgccaaaaatcccatccggtctataaaggcgaatcgtcgatggagagaactcccaactggccatagaaccatactgccaaattgttatgccggcgttcacgataccagctactagacatatggagagcagttttctagcgatgcccttcctctcttcgtcttcgaacgagaagaagcaagcgatgcctaccacataaaccgcaagcttcagggcttccacgtactccttatagaaaagcgcggaagtcccagcaatcaacgcgaaaactaggaggaaagcgtaggcaatattcatcctcagactcagagttcgtttgccattacgaacgagaacaaccaccatgagaagaaaagccaccggtatcgcaacgttcaggtcagaataacgaacctgcgtaagggaaaacgagtcgacattcgccaccacagcaacgccaggaagcgaccctagaacctctccaaccacagagccaataggagaacctgccggcagcgaaatactagagaagagaagtattatcagagagaagcagaagacaagccctgttagatccgcattcggcacgtaagaaacactagaggttctagtcttcattaaggatctccctaacagtaatcacattagtcctgccatattcaaaaggaacatcaagaatcgagctctttatgacggcgccataatgtggggaataaagcccctcccgaacgctaatatcgctttcggcgcaaaagaccaccgaaacaccccgacacgttaggaccgcctctttgcgtcccacaacggaaacatcgacctccggagcaagaacgaatgatctcgtcgcagcaacggcgggcgcagcgccctcaacgtcatccttgaccgcaaccccctccgatccaacctccacaaccctcttgtgagtcacgccaagacgcgtggcccagcaatccgtcgcgcccctgaaaacaaccgtcccatcagcctccgcaacatcaaggctcgcgccgccgcacctcgtatacccaaacaaccctcggaattcattttgctcaagattcccaaaccgcaacgtcgagtgttgtgcggtaccgcgaaggatattgcgcaccttgggatcgcgcgtataaacaccagaaccggggtccacaaaaaacggcacgcccttgaagccaagcgtgaaggaaagcttatcgttatgcgtatgtccaggctcggactcatcgacaaagccatcagaagcgaagaatcccaacgaccagtctccatacctagcaagagccatacccgcatcataaaacgttctcgcccctccgcgccatgagggaaaacatgcaacacggccggaagcaccgtaaaacagctcttcttcggcgaagaacgcttcatcaggagcatccggaccgatttccctgtcaaccagcctactcacgaggcgtaagtcatcatagcgctcgggtgaaatacacactacgcgtcctgaatcgttatctcctacctgcagggaacgcccatctttgtttgttacggcatcaagaaaacgaccgagaatcgaaagacgctcaaaatactccgctggcagcttatagggcgtttcagcaaagcacttgcccgcgaagaagagcatctctcccatcagccgtgtatagcgggtgctgcgctcgaagcaacaaccgtcgtcgagaacctgtttccgcacgcatctcatcagctcgttgtgggtgtattccccccacttccgtgctttgggcaggttggggtaggccgcaacgacagcagcaagtccaagcaggtcggcgatgtagtggttgttctcttgcaatctagctgatgtctcgaggtttgcccaaatatgctcaccatggcagaaagcaagctccgcaatcaccgtatgcattgggtcgtcctcgcaaagcccgcaccgcaacagctcgtatgaggaaagtaggttgaacacgcgaatgccgacttccatagtgcacgtccactggacacccctccccatagggttcacagaggcaaaagagcccactttggcacgataacaatcaaggaaccttgcatcgcctgtttggcgaaatgccgccgcaagggggagaaggtactgcatccttccgtattcccatggcacctttatgtcggcaactccagattccggtttaatggcatcgtaaggcccatctggaaaacgatatccagcaacgaaatcagtacgccattcgtcttccacggtaatatctcttggcagatcgaaccattccccgaaaagcacgaaggagccaccgattatcctctcggcagctctccggatctcgatatcgaaggacttgaatccagcagagccactatcgacaaaaatgcgcccgttaaaaccctcggcaagctcgttacctaaacaagatgccttctggcggatggcgctgctactactcttatatatctgcctcttaaccttacgcgtggtcctgttggcgaccgcaacggcaagacgccggcatatacgctgaaccatgttagcctttcttgcctctcttatccgtaacttccgcttctagaaccttcagcaccttatccatctgcactttccagtcgaactgcttctcggcgaaggcacgcatcttgctgccagtctccgggtctgtagccgtcctatttgcaaaagcgacaaccttgtcaatgggtatcgggtcgtcattgctgggaagcaggagagtgaactcctcgtccccgttaaaacctttctcggggaacgaatagataaacggtatgcctctggcacaatactccctggatttcatcgttgaaccgagggaaatcccgattctatgcaatccaagagaaccgacagcaacatccgcgtcatcaaagaaagcgtcaagcttgcttccggtcgcagcacccgcaaatacaataaaatcttctagcttcagctcggaaacaagcttctccaaggaaggattctctgcacccacaccaacgagcgtaagcagcacgggtcgggcgcccttatactcagcaagcccgcgaatgagcctgtcaacaccatgatgaggggagaacttggcgacagcaagaagcctcacggcttcgcaaggcgcgccagccttcctcaatggaatagctccaaggtcaattccattgtcgtaggtgatgttcggcactccccagatagtgtcgtcatcaaggtaagtgatggcgtagtcgaagtagcgcggggcatgtttcgccctaagggattccagccacgcatatgccctatgtacgacatagctcaaatacttgcgcgattcgagaagccttttatggcgcgcatccctttccatctcaaaggggaaggtgggaaactccaccgcaaggacaaccccattgcttcgaagctgtttcgagaacgagcagaaaacgttatcaaggtggtcaaaacgaataaccactgcctcaacaccgttcgcaagagaccaattgctcagaaaagcatatttgcttctgcgatctcccgcggtcttccgaacatggctggcaacgacttccccgctactaggtcgctctatcctcgtttctaagccgtagtccttacttatatagacgtcgtgtccagcctcctcggaagccttcgcctgagacatcaccttagcagagatgccgagagatgagtttgagttaaagtcaattgcggaagtgaacagaacgctcagtcgacgtcctccttcggtgcccgatctagacatttcgtaggcacccccctgaacagacccaaagggagcatccttgatcatcacagcattcgccccaatcatcatattgtcaccattcacaatcggaccgagcaccttcacacccgcgccgatgtgctaattatcgccgacagcagacgcctcgcaacgccctctacgcccgccgtcgcgcaatcacgcaactcttgccaatcttcgcacgcttatgcgccactacgcctacgcccttgcagccgcaggttgaaccctagccaatttcacactgagcgaggttaacaaattgcgaaaagataaatctacgtctcatatagcctcgaaaggcttgagtttatgccaataccgctaatgcgctcttctctgcttgttcgccgcattcataaaagagctcatctaagggcccccttccgcccattgtccaaatccgcgaccagctcctcgaggtagtggtctacacaaaaatactccgccgacgcgagcgccgcctccttcatcgaaacaagacgctcgcgatccctgtccaaagcttttattgcgtcgcacatcgcttcagccgtacactcatcaagaacgatgccgtccttaccagacgcgacaagctcggcattgtagccaatattgctcgcaacggtcggcaccgctgccatctttgtctcaaccaaaacgcccggaacgccttctgctgcccatttactgggaaaaagatgcaagtcatacctagagagctcggaaaccgcatcatttgtcactgagtcgaagacaccatgatagaaaacgttcggaagcgccgaaacccgcgcttcgaaagcatccttgaatgtctcctcaacacgcccatagaagtagaattcaacgcccgcaaggcgctcggcgcagtccagaatgacgtcagcccccttcgctggtccaattagcgagaagctgacacatttaaggacgccgcccgttttatgcggcaagaccgtagcagtcggcctgttacggcagttagggtaaatcgacacattatccaagccaagattccttgttgcattacacatggtcttggtttcaacgtaaatacgacccagcttcgcacaggctttcctatatgctaaatcgctcgacaaatggctcggaagaaggccccccattgccattagataacaccgagagagaacgctcggtctaacgattgagagcaaacaaagtagagccctttgtatcctcgcgttaccgaacccgagcatgaaaaggccgtccttcgacgtcatcagaagccgaacgatcttgacggttcccacatccctgaagccgaccttctcgacggggacgcgatcagcaagcgcctcagcgagcaaggcgttcttaaccgtcactccgccgtacggaggagggaattgtcccagatagtagaccttcaactgctagcacctactccaggcatcttccatgatattccaacagagctcatcaaaagtgatgccaacagcctttgctgcatcaggaagcaacgaggtcccggtcatgccgggaatggtgttcgtttccagataccagaggcggttgcgctcgtccagaatacaatcggttctggacacaccatagcagccgagggcgtcatgggctcccaacgccatctcctcgcactgcctaagttcttcttcagtgagatttgccggacaaatgtgctgcgccatgccctgctcgtattttgcctcgtaatcatagaattcattagccgggattatttcaatgggaggaagaacgcgaggcttctccccgcccagcaccgcgaccgtcagctccctgcctgaaataaactgctcaaccagaaccgagggagcaagctccagcgcagtgtcaatcgcacaagcgagatcgtctccattgtcgacgatggagacgccgagggcggacccttcggttgaaggctttacgacaagcttgcctcccagtttggtcctaatgtcttctatattgcattcctcaccacgaagcaccctgatgtatccaggtgttgggatgcggaaagattcgaccaacagttttgccacaaatttgtccattgcaatcgcgctggagagaacgcccggccccgtatagggcaagccaacgctctcacagaacccctggatcgacccgttctccccagcccctccgtgaaggcaaatgaagacgccttcgacagaagagtcgaggagcgtatgagcccagccctcaacgcctgtgtctatctttatgacctcgtaacgcttttccagagcctcttccacggctgcggccgataagagcgagacctcgcgctccccgctggcgccaccgcaaagcaatgcgattcgtctagccattttcatcatcctccaaccgtccagttatttgatgtccgacacaacgtagcgaagctttccgcgcttcgtgcgttcgattccgtcgacgcgcttgaaggatacggggagcattcccttggtcctgtcgcggaagcgtttctccgcctcggcgatgtcctcagtgtagttatccgaaagaggaacaaagctaatttcgaccgagtagtcctctagctgatgaatctgagcttccttgatcgtcgccgactcagtaaacaaagcagagagcgcgccgaccttgcctccgtcgggaagcgacaaaagttcgccagtccgcccatcgatccgctcgattacccttcggccgttctttagcctatcggtggtaatggcaaggtcaccggtgtcataacgcaagagtgggaaggcgaaattggtaaggttactaccaacgattcgcgaataatcgccgcattcaatgaactcaacggcggagtaatcctcgtcaacaatgtaatcatggtcggcgtcctctccaatgcacgctaccgcctcagtgaggccgtacagagcatggggctgtaccccgaacgccttctctatgatggaccgctgataaccatataagttctcggcactcgccgtcacggccttgataggcttatcgaaagtcagaccgttttgcgcaacgaatgacgcaaacggcatgatgcacgaaggatacccgtggatccaggttagtccgtaatcattaattgctttgaagtaagccatgtagttttcatcgttgccgtggaaagccgagaacttaatctggaaaagcggctgacactcccgccaaaaaggcggctttctctggttcggcggcacaatggtcctgctgccgaagtcggcatacctcgtgccgtattcaatgccaatacggttccagaagcgccaaaaagccgcccaaagatcgcgaacattgtcgaccgattgcggaaagatgagactcgaccccgtcgatccgctcgtgtgttcagtgatatgaggaatctgctcgagactcttaggtttcaacagctcaacattgtcccgaacggtctgcttgtcaagaattggaagagcggcgagatcgtcagcggtcttgatagacgcagggttgactccgccctcatcaaacatattcgtatagaaaggaacctcgtcatagcagaactgcaccatcttccgaagcttacggtccctaatatcaagtagctcgtcacgcgagcaaacgatgcgcgagttgtaatcggctagacgcgacttaaagtccccgccgaatcttagctcggcaagtcgcccaccttcacggcgacaaccgatgttttgcacgaaaatcggcatggcattatagagcttcatcttatccatattatataactgcctttttgtagcggggatacgtaaaataaacctcgtgggaattggcgggttggctaatgatccgacaggagtcgcggtacacgccaaattctggcgcatatgcgacctcgtctatttgcccatcggcttcgggaacgtcacgagcaaagacaaaggcactctcaatgcacccgtcgcctacaaggtggtcgacaacacgtagcccatccgcctcaagcacaatctctcgaaccactttgcacttcccgccacattgaagaagagcaccgcgtactatcgttgccgccgaatcctcaacagcgcccgtactgtacctggcaacccggaatggcgcccagcactcgtgctgttcctcaccattcaccatcacggtactgtgcgaatgcgtcttcttgaactcaagccttttcgcatcctgataggcaaaggtgccgcagttcacaatccacggccctccatccacaaagcactcgaaactcaatgcgtcgcaatgaacgtgccccatggcataggccgggcccggcttgccggcatcgaaaatcaccttgacgaagcccgccttggtctgccgttcgagaatgcagtagcctgaattctttagcacaccatgaaattccggtacaacgccgaaacgctcgcgagcgcaaagcaacagcgcgtcgcgactctttgccacgttgtcgccgcaatcgttgaacagtggagtcctatcaatcccgcgctccatggagtaaaggcagtcgcacatctgctgaagtttaaaagcttcagcatgctcaccaaagcccgagtcgcgcaagacaattgcagcgcgcatcagatcctcaagcacaatcttctgatacatcgggctcagctcgaagtgcattccgtcatcgagcacctgctcgtttacctgcgcctttagcataggcaaagcaagctcgagcgtcttgcggtcgccaaaataacacgcaaggatagcaagggccttcaagttctctagatagtgattggccaggaggtccttctccaggtgctgagaaagatgtacgtactgctcggccagcgatgcgttaattcgctcgcaaaaggcatcatccgtcctcaatgcgtcatcaagctcagctctaaaagcaagccagctaacgatgcgcatcgatatgacgtatggatcccaggcgacgcctccgcgctcccgcgggcaggcatctatccagctgtccacgatagctttggctttatcaaggtatcgcttatcaccctcatcaaggaaagccttcgcaagaggaagcaagtattcgtggtaatgcaggttaaaacgccagagcggggtcgagagctctgcgtgccacgattcgcgccaatccatgcgctcctcatgatttaggagttccaccctgtcatcaagaagagcatccacatcaaaacgcgctagaaaaactggatcgaagtcaatctccgataatgcgggaacgcggcgaatatccgccttgtccgcatcggggcaaggcctgtaaccaacatgcaaacgcgtgctgcccccaagctttcgccagattctataggcaatctgactaggcttgaggtgcagcgcggtgtctatataaagccgcagctttgacaattctttaatctcccctatttaccgagcacgctcgcaattcgctcgctcgcatgcccatccccatacgggttcgaagcccggctcattgccgcatactcctcttcgtcggacagcagacgggaaaactcaagatagataacgtcctcctcagtgcccacaagcttcaacgtgcccgcggcaaccccctcaggtcgctcggtggtgtctcgcatcaccaacaccggcttgcccaagctaggagcttcctcctgtatgccgcccgaatcggtaagaatgagatgactcgcagccaggaagttatggaagtcaagtacctccagaggattgatgatatggagacgatcgaagccgtccagctcctcgtgagccgccttgcgtacgagtgggttcatgtgaataggatagatcgccttggtgtcggggtgctcctccatcacgcgcctgatcgcgcggaacatgcagtgcatgggctcgccaaggttctcgcggcggtgtgccgtgatcaaaatcaggcgactgtcgctggcccactccaactctgggtgggtataatcctcgcgcaccgtggtgcgcagggcgtcgatgccggtgttgccggtcacccatatcttctcggcacgcttgccctcgtcgagcagattctgcctactcgcctccgtaggtgcgaagtaatactcactgacaatatccacggcctgacgattgaactcctcgggccagggactgtatatgtcgtgggtgcgaagccccgcctccacatgccccacgggaatctgcagatagaagcaggcgagcgctgcagcaaagcttgtggtcgtgtcgccgtgcacgagcaccacgtcaggcccttcctcctcgagaacggccttcagcttcagcagtacgtcgcacgtgacgtcgaatagcgtctggcccggcttcatgattgccaagtcatggtcgggcgttacgccgaagacgcgcagaacctgatcgagcatctcgcggtgctgacctgtcacggtcacaaccgtctgaaactcgtcggggcggctcttgagctcgttcacgagcggacacatcttgatggcctccgggcgcgtcccgaagacaagcatcactttcttcaaacctgcttctccctgcatctctttaatgacttacagcttgtagacgttctcgccgtcaccgcacacgttgcgcggatcgatcaagatacgaccgccgaaggcctcgggcttgcccttgatctgggaatgacccaccattacgataaccatctccaggccatccaggaactcctccatggagtgcacctggcccggaacctcgtcgcgctcgacccacgggtcgtacaccttcacgccaccgccgcacaggtgctcttccatggactcgagcatctgcagcgtggggctctcgcgcacgtcgtcaacgtcctccttgtaggtcaggccgtagatgcccaccttggaggcatccttgatcccacgctcggccataacctcgtgggcacgatgcagcacatactcaggcatgcccgcgttggtctgaagcgcaaggcggatgaagtttgccgtttcggggtagtcgcccaccaggaaccacgggtcgacgggaatgcagtggccgccaacgccggggccgggctgcaggatgttcacgcgcgggtgcttgttggagatgcggatgacctccgccacgtccatgccgccgatacggcagatcttggcaagctcgttggagaatgcgatgttaattgcgcggaaggtgttctcgacgactttggtcatctcggcggtacggatgtcggtcacactgatttcgccctgacagaaggttgcgtaaatcttagcaacctcctcgcccacctcggggtcgtccgcaccaatcgtacggttgttgtgcagcagctcgtaaaccatgtttccggggatgatgcgctccggggcgtgcacgagcttaacatcctcacgctcggcctcgatgagcagcgggcgcacaaagcgatccaccgtgttgggcgaaatagtcgactcgattacgagcacggcgcccttcggggcgacctcgagcaccgtcttgcaggcggcaatcacatagcaggggtcgatcttcttgtccagcttatcgtagggcgtcggtacgctcacgatgtaggtatcgcacacctgatactcggtcgtgaatttgatgccagatttcaacgcgtcgacgaacagctcgtcaagcccctcctccttgaaggtagtgtggccggcgttcagggttgccacgagttcttcgttgtagtcggttcccacgacctccacgccgtgcgtggccatcatgagcgcggtgggcagtccgatataaccgagaccgataacgttaaccattgattttaatcctttcatttgtttgtttggtcttatatccggcatcggataaaacagcgatcatcttatccgccataagctttcttgagtactcccgattcatgaaatcaaccgccgcttcgctcattctggcgagattgcgcgcacgatcagccctcgaggcaaaagcctcgagttcgctgatgtcttcctcctcgcttccacacaaagcaataccagcaccgctcctacgaacgagctcagatgcatcaccttccgggcctacgaacagaacaggcacacctcgggcaaacgactggaatatcttcgatggaatggttcccgagaattcagcgctcttttggagcgagacaacggtcatgtgaacccctgcgtagcgcggttcaagctcggccattggaacaccatgctcaagtttgagaaaaccgtagtctccagtagcaaccaactgctctagctcgtcgcgagcagcaccctcgcctataagctcatagcttgatgcaagcccaaggttaacgattcgcttcacgtactccaccgtcgcaggcacgtcctgagataatcccatagtcccaaagtaaccgaaacgcaaagggccatcccacatgtgtttacatgcaacaacatcggctccattgggaacaataacgatactgtcgcccggaacaccagccgcctcaaggtctttcttaaacccatcggtaagcgcaacgacgcaatctgcagctttgcagaaagataactccagtgatttcatcgcagctacctttgcgcccctgctgcctgtcgccagcatctgcttgtaagtaagatcgcgaaactcaaccacaaggggcaggcggcacttctttgcatagtgaacgccgagccacgcagcgaagacggtcccgcatgtgacgagcactacatcataattactaccaacaggcgatttcttacccaggtttttcaggccattagcgatgaaactgacaccgctctctattcgcttcgcaaagcttgtgtttggctgaatctttgacgcggaacgaaagactctaacaccatcaatcaattcttcaactagaggtttcatctcatagccgtcgaacaagcgaccaacgggataattcggccatccggtgaacacagttacatcatggctctcacgcacccagatacgcgaatgctcggtcgccctgaatgatgcagcgatattctcaggtttataaaactgcgaaaaatacaggatacgcatttcagtctcatctaattcgatgctaacatggttagtttctttgcgccgacaacacgacgcctacggtttgtgcgcttcatctgaaatcgctcacgacaaaatgcttcttatgccgaacaaatcgagcccacacacccattgggagtgattacgccgcagcttcaaagagctcctttcgatcaaacgaacgcaagcggaaggttgcattacttgcccctcctcatcgccttgaaggtcttcacgaacacacgggcgtccaacccaagcgactgatgacgcacataaaacaactcgcgggcttgcctctgaccgctctgccaagtcgagttatttcgatcagttactgcccaccaacccgtgatgcccggcttacaggacaagacttcttcgcgagcgtcaccgtattcgtatgtttcttgcaacgtcacgggacggggccctatcactgacaaatccccagatagtacgttcaggaactgaggcagctcatcgagcgacgtgcgtcgcaggattcgccccacacgggtgatacgcggatcatcatcaagcttctgctcgcgcctccaagtctcaagctgagctgaagacatatacctctcaggatggtcatgggcgtcagagaccatcgtccgcagcttgaagatgtaaatcttcttacctccctgcccaatacgctcctgcctaaaaaatggcttacccggcgtatcgacacagatcgcagcacatgcaacagctacgggaacagctagcaccaaacacacccccgcgctaaacgcaatgtcaaaaactctctttgctacgagatagccaacgccaccttttttgggagcagccacgcttggatcaggcgcaggagccttatacgccccatttggtgtgcaacactccacgcaattcgagttcttggtagacatgtaacatccaattgcggagttgcattcgcatgagctccctgtgccctcatcatttctgatattgataagcctatcctcatctagtccagaagcacacgctacagcacgacccggattagccccgggagaggcgatagcgttcctgaaagctagggccaaaaccttcctggccactatgcgcacaccgccccgaaaacgggttttgcaagaaattgggcttccatgccacggatgcggttacaattgaatttagaaatgcgacgcatccgcaggccgttcgcaaaacagctcacgacctgcgaaaacgcctttcctttgttcgtgctagatttggcgggaagcgcgaacgcacccatggatttctcagagaactccgggcgcgtttttaatatgcgcaaagggatctggccggcgagtacgttcagaaactgagggagctcgtcgagggaggtcttgcgcagaaagcgcccgacacgcgtgacgcgggggtcgtcgtccaccttgcgctcgcgctcccattgcgttagctgctcgggactcaggtgcttctccacgtcgtcggagtcggccaccatggtgcgcagcttgaggatgcgaagcggcttgccgcgatagccgacgcgctcttggaggtatattggggagccgggggattccaggcggataaccaggcaaagaagagcgaccggaatcaaccctacgatcgtcgcgcacgccgagaacacgatatcgaacgcccgcttcacgaagtggtaccccagccgcccctcgacagccagcggttcgtactcgcgtacgctttcggccggcgccgctcgggatccttcgacttcgctccctacggtcgcttcgctcaggatgacagcctggcggacccctccggtcgcttttttaggatgaccgggggcggcagctccacgctcagggcagcagccgtcgtccagggcaaccgctcccccggcgtccactgccgttattccgttttcaagttcgttttctgacaattcccaatccgattttcgtttggatggttcgcccgaacatatcgatctccagatacgcggtgcgcttgcgacggttgatcttcctgatccagccctcgcggcccaccagcgggcccttcagcacgatgatccggtcgccctcgatcacaccctcggacacgcccaccgtccgatgccccttctcggtgaacgcgtcgatccacgccacctcgtcgcgctccaaaggaacgaaacccccgtcgttgctcagcacccaggcgaacgccggcacgcgccgaagctgcgattccagctcgtccacgcggtcggtcaccacgatcaggtagccggggaacagcgtggccgtacaggtgcgccactggccgcggaactgcttttgcacctcgtagcgcggcacgaagcactcctgcagcacatcgtcctcgaccaagctctctatcaggcggcatacggcgaactcgcgccctgccaccgtctgcaccacgtaccacatgcacggctcctcaacgcgcgacggcatggcttcgcccttcggctgcgccgccgacgcgcacgtatgacgggggtattcatcccttcgaagctggcgaaacgcacacgcggcatcgttttcgcgcatcgaagtatgttcggtcgcgcccgtaaaggcgcatgcagtttcctgcggggagatcgaaggaggggtttcgccgtcggcgcctatccgtcgagctcctcgcagcaagctggttcaagctgcgaagggcgaggtcaggttttgcgcacgatctcaagtcccaccctcacctgcttctgatcgagcaggccgatgtccaggtaggcgatgcgcttgtgacggtcgatcttcttgatgcggtcgacgtgaccgcgtagcggcccttcgtcgatgatggtgcggccgttgtctatcgtgccgcgggaaaagcccaccacgtggctcggcccgccgaaatcatgcacgaacgaggcctcctcgggccgcagcgcgaaagcgcgccgctcggcgcccagaaggcgcgcgaacgcagtggaacgtttgatggttttctcgaaagcctcgatgtcgtcggaagctacgaacaggtaacccgggaacatggtctccgtgagcagacgccaaacgccctggttcttcttgaggatgcagtagctcagcgcgaagcagtcgcgcaccagctccggaccggcaagcgccttgacgcgctcggccacggcgcgctccctgcccggcaccacctgcagcacatagcgagcccgaccgcgcgaaggcacgggcggctcgatcgattcagttggagagatcctgatgacgcggggttctcgaacgacgcatccgacggacgcggcgcgagcgacgccgcctattcgatgcggctcgcgacagtctttctcagactgccccccccccggacggtttttgggtcagcatgtcatcgcagattgcagaagcagggcgagccagggcgcactgctccgtcgacgagcttgcatgctcatcgatgaagcgatatgttgaagccggaaagcccataaacttgtaccctaaccgttactcgtttgtaaagcgcgctctatttaaccataggctcacgtcattgcaagacgcctcgacacaaaagaccggtaacatgtaacaaaaacccgttcggcgcgcagcgttgttttacaagatgataacggcagagcgccggaagtgcaacagtgaacagccccccccccccccgagttctccataatttataagcttctccatcatctcaatcttgacggacgccgcgaggtctcgatgtcgctttgcaaggcatgcggccagccgctcgtctttccgacgcatctcgctcagacggaaaaggcgttcgtgcgcccgaaacgggcgttcatggccatttgaaagatgagcggcgattttccgtcacacgatgacgattcggatgataaattggtatctgcaaatatccgaaaacaaagcaggagcgattatgaacccggcaccggcgcatagcaaaacgacctcgacgcagcggccccgacgctcccccgtccgcatagcgatatcgacgctgctatgggcggtcacggcatgcgttgtcgtcatcatggccgcacgcttcgcaccttcagccctgagcaacggcaggctcatcccggaggcggcagcattcatcccgtggctggcccttctcagcgtcctcgttctcataatcgcagcgttgaccaggcggaaagtactttccgccgtcaccgttctctgccttgtctgccagatcgtgtggcatgtcggcttcttcttgcccgcgccccgcatcgccgaggaggcggtcgaagccgtcccggagcagaccaccccgcgagacaccgtcatgcgcgtgatgacgctcaacacgaagaacggaaacgccgatgccgagcagatcgtctcgatcgtccgcgaccagcacgtggaagtactcgccatgcaagaggtcagcggctcgctgatcgaacggctttccgccgccggactggacgagcttttgccctcgcgcgtcatcggcttggcaggagcgggcgacaacggcggcgtcaacgtcatctacacgctcgcgcccatgcgcaacgcttcggaaagcatcttgcccctcaccggatctgccgtgccggcctgcacgataaccgccggatcccacgaggtgcgcctcgtcagcgcgcatcccacatcgcccaagacgggcacgctcggcttctggaacgagagcctcaccaacttgggaaccttgcgccgatacagcgatgaatacctgatcatgggagacttcaactccacctgggatcactcccgctaccgcaagatgctgggagacacgctggtggacgcctccgagcaagcgggcgaaggcttccacatgacgtatccgtcggaaccccactatgccatggttcccgtgccgcccatgatcgagatcgaccacatcgtgtactcgaagaacagcggtatgtccgtcggcgatctcgagaccgtcaacgtgcagggctcggaccacttcgccctcctcggaacctgggtgatcgagtaaccgaagccggaaactcgtcctccccggcgcacctccatcatttcgaatacctttgcatcccagccgataacttgtcggattgctgaccgatcgcccatagaggggaaacgatcgtcccagctcgcacgagaaaccccatacggcgactagactcgcctcacgcgaacgaacccgagaaccgcttcccgccgagcgcgaggagcggttcgacctatcttcacccctctatccgaaaggaggcgttcatgccgtatcgaggcttactctatttcgtttcccaaagcgccagctccgattaccgctccgacccgtacgcgacggaacgccgcagcctcccgaaccgcacgcacggcatccgctacgcatccgcgccgaaacgttccacctgcatcaggacctacgctccctccgagacggtgcgccccgtatgcgcaagctcaaccaccgccgccagccaagcaagccgaagcgtcgagccgcagcgcatgctcaaagcggtgttcgccatggtgctcgtcgccgtcctgtctgcgtttctcggaatcttcgccgcgcacgccctgtccgccgcgatcgacgacggagcctttcccctcataggatcggccgacgccgccaccgccgaagacggcttcagcacccctcgatcgtcatgggaacaaggcgtcgtgcccaccctgtatcaggacgacccgcaatgggccgatcgcccctacggatcgaggaccgtcggcgatgcgggcgccgccccgctgtgcctggccatggtgcgcatcgaagccaccggggatgccagcatggggcccgtcgaagtggcctccctctcgcagagcagcggctatgccgacaccgttgaagccaccgggctcctgaccgacggcgcagcccaactagggctcgcatcgcgagagatcgatgcgaacgagttggccatgcgacgcgagctcgtgggagaccgtcccatcatcgcctccatgaaagcaggctcgttcggatcgtcggacacctacatcgtggtcaccggcatcgacgagcacggcgaactggcggtggtcgatccgctcagccgcgatcggacaagccgccattggacgttcgacgagatcatctcgcaagccaccggcctctggtcctacacggcggccgcgtaaagtccgccgctctccccgccattcagcgcgcccgatgggcgcgcttttcttttatggaaagcatgctttacattgctggcgcaggggtctatacttgatggaaagctagctttacatattcgcatcggagaggagcgctatggagaaccggttggaggagatccgcaaggcgcgcggcatcaagcaagaggatctcgcgttggagctgggcgtgtcgcgccagaccatcagctcgctcgagaaggggcgctacaacccttccatcctgctcgcgttcaaaatagcccgccgcttcggcttgcagatcgaagacgtgttcatctaccaggaggaagaccatgaataggaagtccgctgtcctcacgctgtccatcggaatcgcctgcgcgatcgtcgccgtcgcgctggctctcgacctcggcgggatctcctcggtcctgcccatcgccgcgaagggcgtgtggggcttcgccggatgcgcggccgcgctgctcgtttgcggcgccttcgcgctggcccacaagcccacgccgcagcagatcatcgagcagggcgacgagcgcaatgcggccatcaacgggaaagcgggactgcgcgccttcgaggcgttctccgtgctcgcgcctttggcggcgctcgcgctgtacgccttcgagcagatcagcacggccggcgtgctcacgatcatcgccgtcgaggtcgtagcctcgatcgtctatttcgcgcagatcgcccgcatgcagcggatcatgtagcgctggctcgggaaccggatctcctgtcatcctgagcggagcgcgcctcagcgcgcgctcaccagcatggtctgatacgcgacctgcaccgttgccggatgtccggcgcgtcgaaccacggcggtcagcgcctcgcctggcagacggtacgtgttgttgttctgcgagatatgcatggccaccacctgctcgagcgcgtcgctcaacagcgcctccagctcgtctgcggcctgcacgttcgacaagtggcccgtatccgagcccacgcgccgcttcaccggatacgggtagggcccgtctttgagcatctgcacatcgtggttgctctccagtgcgaggatgcgcacatcgcgcaacgcctcgtcggcctcgccggtgacgatacccgtgtcggtcatgaaccctaccgcgtctccgtcggcctcgacccggaacccgcacgacgatgccgcgtcgtgagacgtgcggaaggcgtgcacctgcatgcccgccagcgacagcgcgtcgcccgaggagaacgcccgtaggtcgcatgcgccctccagcacgatgatctccttgctggccgcgcgcacggcgtcgtcggcgaacaccgcgggctcgatgcccagcttcgccaggccgcgcagcaccacgccgaggcccttcgtatggtcggtatggtcgtgcgtgatgaggacggcctcgaggttcgccggatcgaacccggcctcgtcgcaacgcgcgaagaaatcgcgcttgcagatgccgcaatccacgagcacgcccttgcccgtggcggtatcctcgactacggccgcgttgccgcggcttccgctggccagcacgtgcaatgcaagtcgttggttcatagggttcgcttcccgcatctcttctcggtgtctcagtcggcctccgattgtacccgaatgcgcgcccctcgcgccccgcatccccaaacgctcaaaagggcgtcccgaatggcacggttcctgcccgggtttttcctttcaaaacgcgccgcgcgcgggcggaattgccgccgatcgggaatcaacggttccccgcgccgcccgtttcgcctactatggttcctcatacgaacatgcaggtcgaaccaagggggacggggtatcatggcatcaactgtcgcagcgtttctagagcgcaaggatatcgaggtcactttccaacgctacgccatcgacgcgttgtcggccatggcgcagggtctgttcgcttcgcttctcatcggcaccatcctgagcaccgtgggcgatctttcgggcttggcgttcttcaaccaaatcggcacgttcgccaaaagcgtggcggggccggccatggccatcgccatcggatacgcgctgcacaccccgccgctcgtgctgttctcgctggccgctgtgggcttcgccgccaacgacgcaggcggcgcgggcggccccttggccgtgctggtcgtcgccgtggtcgcctccgagctgggcaaggccgtgtccaaggagacgaaagtggacatcatcgtcacgcccgccgtcaccatcctaggaggctgcgggctggctctgatggctgcaccgtggatcggcgcgctggcctcgtcggtgggcgggttcatcatgtgggccaccgagctgcagcccttcttcatgggcgtcatcgtgtcggttgtcatcggcatcgcgctgacgctgcccatctcgtcggcggccatctgcgccgctctcgggctgacggggctcgcgggcggcgcggcgctggcagggtgctgtgcccagatggtgggcttcgccgtgctgagcttccgcgagaatcgctggggcggcctgctgtcgcagggtctgggaacctccatgctgcagatgggaaacatcgtgaagaagccgctgatctgggtgccggccatcgtcgcctcggccgtcaccgggccggtggccacgtgcgtgttccagctgagccagaacggacccgccgtggcatcgggcatgggaacgtgcgggctcgtaggccccatcggcgtgtacaccggctggatatcgggcatggaggccggggcggccgcgcccggcgcgttcgactggatcggcctcgcgctggtctgcttcgttctgccggcgcttatcgcctgggccgtgggcgcgctcatgcgcaaggccggcctcatcgccgaaggggatctactgctggaggcgtaaggcgccagcacggagcgccggcgcatgcgcagccgctcgcgccggcgctcccttcacagccgcttccttcgcagcggctccccctctcctactacagctgctcgacgatgcccgtgatcaggcgcgagaaatcgccctcgcgcgtcttcgccacgtccagcacctcgagtcccgtggggcttgcgccctcgatgccgcagcccatgttcgacaccagcgagatgcccagcacgcgcatccccacgtgccgcgcggcgatgacttcctcgcacacgctcatcgccaccgtatcggcgccccacgaacggaacatgcggatctcggccggcgtctcgaagctgggtccgagcgcgcccaggtacacgccctctcgcacccgcacgccgcgctcggccgccacgtcgtgggcgatggcgcgcagctcggggtcgaacgcatccagcatggagaagaagcggtccgacaagttcgccgggtcgggcgcggcgatgggattgcgccccgtgaaattgatctgatcggccatgatacagaaatcgcccacctcgtagttcgggttgagcgcaccggccgcgttcgtggtgataagcgtgcgcacgcccaggcgctccatgagccacaccgggtaggccacctcctgggcgctgttcccctcgtaggcgtgcagacgaccctgcatggccagcacgcacttgccgcccagcgtgccgcagacgaagcggcccacatggctttcggccgtactcgtcttcatgcgcggcacctccgcgtaggggatgctcgccgcatcggcgatctcgttcgccagcggattcaggcccgaacccagcacgaggccgatcgtcggttcgcgaccttccagccgctggcgcagcacgtaggccgaaagcgtcaggttgtcgtcgaggatgttgcgttcaagcatggaagccctccgttcgtaggtttcgtcctattatagccgtccacgcgcgagcgtccgggacggacggacgctcgcagcagcgatctcggcgggttcggcgcgggttcggcagttccggcgggttccacgagcgccgattttgcgcggaggcggcgccgacgggcctcgcgcaccgtttcgctggggtcacgtgcagcaaaatcgaggttttggcaccgacgacccgcccggacaccgcgttttgcagggatcgcgaaccgcgacctggggtttcgcttcggcatccttcgaagaaggagctgggaaccggccgatgactgccaaaacctcgtttttgccgcacatccgagggcgaaaccgtgcaaccggcagcgcataagcctgtcctgcccgcgcgggacgccgcgtcctgccggaagcgccggggctcgcacggaaaccgcgccgccccgaagatccgtctacacggcgcgctttcgggcggtgaggacgcgggggcgcccggcgagatcggccgtgacgcgaacatcggagaagccggcctcttcggcaaggcgggcggcctcgtccaggcaggtctcgtgcagctcgaaggcgaagccgccgccctccttgagggcgcggcggcaccagggaagcaggcggcgcagcacgtcaagcccgtcggcgccgccgtcgagcgcgagcgcgggctcgaattcggccacctcgcgggggatatcgtccatgacggccgtgggcacgtacggcgggttggacaccacgaggtcgaacgcgcccatgagcgtaggatcgacgccctcgcccagatcgcacgacagcacctcgacgcggtcgcccagctcgagggcagccacgttgtcgcgagcgagcgcgacggcctcgggcacgatgtcggtcgccaccacgcgcgcgagcggatgctcgtaggcgacggagcaggcgatgcagccggaaccggtgcagaggtcggccacgagcagctcggggggctcgggagcgggttcacccgaggcgacggccggcgtcgattcatcctcggcgacgccctggtcggccgttcgctcggggcgttgctccccggcttcgccttccggccaagggacagggggaaggtcgtcttccggccatgcatgctgcgccacccgcttcggcgccgccggcagcagcgccaaggcttcactgaccagcacctcggtctcggggcgcgggatcagcacgccggggcgaaccttcaccgtgatatggcgaaatccgacctcgcccgtgatgtactgcagaggctcgcccttgccgcggcgcgtgacgtaggcgcgcagcacatcgcgctcctccatcgacagcggctgctcgaaattcgcgtacagctcgatgcgggaaaggccggtcgcttcggacagcagccactgcgcggacagccgcgggttctcgtcgcccttgcgctcgaggtagcccaccgtccaatcaagggcggcctgaatggtccagatgtcgttcaatctagaccgcggcttccagcttctgcgcgcggtcggcggcctgcagagcggtgatcacgtctcccaggccgtcgcccagaagcacgccgttgtacgtgccgttgaagccgatgcggtggtcggtcacgcggtcctgcgggccgttgtacgtgcggatcttctcggagcggtcgcccgatccgatctgcgcgaggcgcttcgcgccctcggcggcctgctgctcggccaacatcttctcgtacagacgggcgcgcagcacggccatggccgcgatcttgttctgcagctgcgacttctgatcctgcgactgcaccacgaggcccgaaggcaggtgcgtgatgcgcacggccgagtcggtggtgttcacgcactggccgcccgggccgccggcgcggtacacgtcgacgcgcagatcgttctcgttgatctcgacctccacctcgtcggcctcgggcagcacggccacggtggccgtggaggtgtggatgcggccctggctctcggtcttcggaacgcgttgcacgcggtgcacgccgctctcgaacttcatgaccgagtacacgtggtcgcctttgaccttgaactggatctccttgaagccgccggcttcggaggccgacatgtccatcgtctcggtcttccagccttgcgcgctcgcgaaccgctcgtacatcttgtacagctcgcccgcgaagatggccgcctcgtcgccgccggcagctgcgcggatctctacgatgatgtccttgtcgtcggccgggtcggccgggatcagcatgaacttgatatcctcttcgagcgccggcagcttcgcctcgatgccggcgatttcctccaacgcgaattccttcatgtccggatcggccagcatctccctggcttcggccagatcgtcggccgcctgcacgtactcgcgcgccttcttcgccagaggaccctggttggcgtactctttggccaggcggttgtattccttctgatctgcgaggactgccggatcgcccatcttcgcctgcacatcctcgtaggcttcgatgatcttcgtcagcttctcgcgcatatcgttatcctgcatgatgggtgctgtccttttcgacgtggttcccgtgctcgcgcgccccgcgcgccaagaacgcccgctccaagcatgcggagcgggcgcctatgctgtaactggtttatgatagcagatcgaccgtcgatccgcatcttatcctagatcgccagatactctgcggcctcttcggcgcagacggcgccgtcggacacggcggtcaccacctggtgcaggaacttcgtgcgcacgtcgcccgcggcgaacacgccgggcacctcggtcgcgcacgactcatcggccacgatgtatcccgtttcgtcgcactgcagcgcgccgcccagaaactcggtgttgggctcggtgccaacggccacgaacaggccgtccacggcgatgtcgcgctcctcgcccgtctcgagcatctcgaggcgcacgccggccagcttgccctcgtcggccacgagcttgcggggcacggcgttccacacgaactcgaggttcggcaggtcctccaggcgcttgtggtagatggccgtggcgcgcagcttgtcgcgccggtgcacgaggtacactttcttgcaaatgcgcgacagatagatggcgtcgcccgcggccgtgttgccgccgcccaccaccatgacctccttgtcgcggaagaagttgccgtcgcacgtggcgcagtacgacacgccgcgcccttgcaggtcctcctccagctcgagtcccagcttgcgcgggcgcgcgcccgtggcgatgatcacgctcttggcgcggtactcgttgaacgcggtggtcagaaccttcgggttctgggtgaagtcgaccgacaccacctcttcgccgacgttgctcgcgccgaaacgatcggcctgctgtttcatggcgaaggccagttcgaagcctcccgttccctcgggaaagcccgggtagttctccatgtgctcggtctgagcaagctgtccgcccggcgagatgcgctcgaacagcaccacgttcaagcctgcgcgcgcggcgtacagtcccgccgtgagcccggccggaccggctccgatgacggcgacgtcgatgacgtcgttcgtcgatgccgccttgcacgcggcagatgtttcgttgctcgcggtttcctcggtcatgcatgcctcctggtttcgcgggtatccgtgttttccgagtgtaagtataaggtacgtcgcctaaatgtcacaaacttggcaccaatatgcgctaaaacggcaggaacggagcgcgaccggcaacgcatgcgtgacggattccagcatgcgccccgcgtccgccccctccgcactaccatgaatgcgatcgctatcgaaaggaccgggcatgaatcacgcgagcaacatgacgaacgcggattcggcagggagcgaaacccccgccgagctacgcaccctgtatcttgccggaggatgcttctgggggctcgaagcctatctgaaacgactgccgggcgttcgcggaaccgtcgtcggctacgcgaacggttccaccgagaaccccagctatcacgacgtatgtcgctggaacacgggtcacgccgaaaccgtggccgtaacctacgacccgcgcgtgctgcccaccgacgtgctgctggacgccttcttcgaggccatcgaccccacgtcggtcgaccgtcagggaaacgaccgcggcacccagtaccgctcgggcatctattggaccgacgaggccgacctgcccgccatcgaggcgtcgctgctgcgccagcaggcgcgctatacgagccccatcgtcaccgaggtggagccgctcgacggcttctaccccgccgaggagtaccaccagaactacctcgagaagaacccgggcggctactgccacatcgacgttcgcagcgccgacgcgttcgccgagcgcatgggactcgaggaaggccgggcctgcgtgcaggtggacgggctgtgcgaaccgctcgcgttgggcgagggcgccgcgacggcgggcgcggtcgagcgcgaggacatccccgcgccgtccgtgtcgcgtcgcgcagacgggccgcgcaacgaagacggccttgcagatgcggacgtggacgcgctcatccgcgaggcgggctacgccgccccctccgacgacgagctgcgccgcatgctgtcggccgaccagtaccgcgttacgcgcatgaacgctaccgagccgcccttccgcaacgcctacgaccgcacgttcgaaccgggcatctacgtggacgtgaccagcggcgagccgctgttcgcctcgtccgacaagttcgatgccggatgcggctggcccgccttctcgcgccccatcgcgcgcgaggtggtcaccgagcgcctcgaccggacgctgggcacctatcgaaccgaggtccgcagccgtgcgggcgatgctcatctcggccacgtgttcaccgacggcccggccgagacgggcgggttgcgctactgcatcaacagcgcagcgctgcgcttcgtgccctacgcgcgcatggacgccgaaggctacggctacctcaagcccctcgtcgagcaagagctcgaccccgcatcatcctgagcgaagcagcggaagccgcgaagtcgaaggatcccgtgcggcgccagcggggaatctcacggctggcgccgcacgggatccttcgcgtccccgctgcgcggggcctccctgcgctcgctcaggatgacagggcgcccgctagcaggcctcgcttgccgcgggctctgccgcgcgatcgggccgacgcgcgcgatgacggtagcgcagcagagcggcggccgccacggacagcaccatctgcacggcggtcaccgacagccagatgccgtcgagcccgaacaggcgcgccgcgccgaacacgatgaggacgaccagcagcgcctcgccgtacacgatggcgctcgacgccttcgcgtcgtccaccgcgtagaaatacgaagtggacgcatgggtgaacccgtagaacacgtacgcggtggagaagacgggcagcgcgtacgcgatgagccctgccgtctcgtcggacgccccgaacagcagcggcacctgattccgcagcaggtacatggccgccaaccccaacacgcccaggctgatggtgatcaggtagttcgtgttgcggaagcggcgcacgccgtcggcgtcgcccgcgccgtagtgcttggagatgagcggctgcgagccgtcgcccacgccctggatgagcatctggatgacgcaggcggtgtacgacaccactgcgtaggccgccagcgcctgctcgccgccgtacatcgacaggttcacgttgatggccaccaccgtggcctcgggcaaaagggtcagcccgaacggcgccagccccaaccgcagcgcatgcagcgcgatatgccggtcgggacgcaagtcggccacggcgatgcggttctcccttttcaggaaaaagcccagcaccagcagaaacgccgaaacctgcgagaccacggtggccgccgccgcaccggcggtgcccatgcccagcaagatgacgaacacgtagtcaagcgccacgttcatcaagccggcgaacacctgcacggccatcgcgtaggccactttcccctggttgcggataagcggcgtgcagccggtcacgaggatctggaacgggacgccccaggcgatgacgcccgtgtacgccgccgcctgcgccagcgtctcgccctggcctcctaaaagctcgcaaatgggcgtcgccagcgtgaacagcagcgccatgatgggcacggcggacagcgcgagcatcgtgagcgtggtgcccatggcgcgccgcgccttcgcctcgtttccggcgccgcgcgcgatggacgagatcacgccgccgcccatgccgacgcccgtgcccacggccatgatgaacgccaccagcgggaaggctacgttgatgccggccaggcccgcgtctcctaccgcgtgtcccacgaacacgccgtcgatgatgctgtacacgccgcccagcgtgaacgtgatcatcgtggggacgatgtatttcaaatactctttgagcatgcctctagtaatcatgtcatgtcgctccgatatgcaatttgctgagattttttccgcatggtactctaaaccttaaagctgctttaaggtaaagcccgcaatgtgcgggattcgccgaatcttcagaccatcgataaggaacgcgcccatgaccttgccccgcctctacgacatcaaagaagcagcccgctacctgggcgtcgcctcctccacgctgcgctattgggaaagcgagggcctcgtgcaagccggacggggcgaagcgaacggctaccgccagtattcgctgcacgatctcatcgaggccagcgagatcgcgttctaccgcaaactgggcgtgccggtcaaggagctgcgggggtaccgagcgctttcggcgcgcagcctggacgaggccctcgcgcgcaccgaggacggcgtcgagcagcgcatcgccgagctggaagccacgaaggcgcgcctcgcccgccagcgcgcgctcaacgcgaaagccgaggagctgcgacgggcgggcatgcagcccggctccccggccatcggcagcctgagcgccatcgactacgatgccgcggctccctggaagctgctcgtggaggagccctggcgctacggggtggtcgtctttgcggacaagcctgacgaggtttacgagtcggccgtggacgcaggcgcgcaggacggtgccgtgctttggcgccgatcgagcgctcacgacgagacgacctgccgggagtgcctgctcaaagtgtcccccactgccgacgccagcaacgccgccgcgctgttcgccgaagcctcccgccaaggcatcgagcctcaggcggtggtgggaaactaccttctgacggcatcggacgaaacaggacgctgggactgccatcgcgcctgggtggtgggggaaacgccgcgcgatcccgcagacgaccggtaagcccgggcgacatccggcatgcgggcgcaaaaaagccccctccgagcggagagggcttcgccgcctcaggccgaggaagaagctagccgatcatcgagaggatgttctgcttgggctgcacgcccacggcctggttcttcacctggccgttttcgaacaccatgagagtgggcacgctcatgacgccgtacttctgcgcgatgtcggggctctggtcgatgtcgagcttgtagacggctgccttgccggccgtctcggcggcaacctcgtcgagcgtgggcgcgagcatcttgcacggaccgcaccacgtggcgaagaagtccacgagaacgggaccctgcgcatcaagcaccttggactggaaatcggaagaagaaacgacctcgctcatgttaaagcctcctttgtaggggccgcgcgcatctctcacccgcggcaattcttgttcgcatcgtattgtaaacgcgtttgctcaactgtgcatcaaattgttacggttcggagcatgaatctcgacattcccgacattttcgcccggtgaacggtcgtcgaggacggtctcctccatcgttgctccacagacggcggccttgttgcacgtcttgcctgcgaatgctcgaggggcgggcgcgctgagatataatcggagacgacccacagaaaggaacccgcatgagcgaaacgaccgagcacgccttcgcagcacccgcctcctcgcccgcatcgtcgcacgtgcccgcttggcgcggacacggcaccgtcccggtgaacctcgtgctggaaggcggcgccatgcgcggccagttcacggccggcgtgctggacttcttcatggatcagaagctgttctgcgagcgcgtcatcggcgtgtcggcgggtgcgctgtgcggctacaactacgtggccggcgaagacggccgcacgtgctacctcaacacgaagtactgcgacgactggcgttatctgtccatgaagagcttcgtgcgcaccggcaacgcctgcgggcgcgagttcgccttcgacgagatccccaaccgcctggagccgttcgactacgccgggttcgaccagtcgcccatgcagctgatcgccgtttccagcgacctcgtcaccggcgaggcggactaccaccccttcgccgactcgctggccgacctgccctacctcatcgcgtcgtcgtccatgccgctggtcagccagatcgtggacgtcgacggcaagctgctgctggacggcggcacctgcgacagcgtgcccattatgtactcgatgctgacgggcgcgcgcaagcacatcgtggtgctcacgcaggcgaccgactacgtgaaaggaccgaacaagctcatggccatcctgcgccagcgctatggactgtacccccactacctcgagcgcctgcagcaccgccactacgagtacaaccgcacgtaccgcgcgctgcctcgcctgcacgatgccggaaagctgttcctcatcaggcctcccgagccggttaccgtgggcagcatggagcgcgacgccgacaagctgttcgcgctctacgagcagggctacgccgaagcggcccgtcgctggcccgcgctccaggcgtacctggaggcgtaaaggccggctcagcgcacccgcatcgcaaggcgtcccgttcgcacgaacggcctgcgcatgtggccctcttcccgcgcagttgtccggcgcacagcggcgcgcccgcgccgaagccgcaggacgtcgcgccacgctctcgcccgcatcgaagccgcaggacgtcgcgtcgcgctcgcgcccgtgtagaaccgcgcccgcgcccccaccgcaccacggatgcgcagaaccggcggagcccgcgcgggcgacgcgatccggctccgacccctcctcgcctcgaggcaccctgatgcgctcaaatgtttcacgtgaaacaatctggtgcttgagaacagatgtttcacgtgaaacattcggatccttcgccgtttctagcggttcgccaagggcggctcgatcccggtgccccctctttcgcggcatgcgggggcgggactcgcgggcggagcgcgaggcgcgcgggacgggcaggcaaagcgcagggcgcgcgggactcgcgggcggagcgcggggcgcgcggggcgggagggcaagccgtcgcgtccgacgcgaatgggctcgcttcagcatcggcctgacgacaggctggcaagcgggatggcagagattgcacgctatgcacgattatttgggtccgtcgtcaaaggcgtaggaagaaaacccaggtcggaagaaacggcgatggcggcgaatcgtgcatagcgtgcaatctctgccatgcagaggcatgcagaggcgacgcgagcgggggcacgggcgacccgccgtagagcctatgccaacacgggctccaccctgcaccccgcttcgacgcgcccgattatttcacgtgaagcaatcgggcgcttgagagcaaatgtttcacgcgaagcatcttggccgcgcgcaggtgccgcgtgccgaaaaatcacacgcggacggaccaggcgcgcggggaccaggcgcgcgggtgcggcgctccagagggcctgacggggacgcaggctccctaggcgtcgcggtccgcttccccgccttcggccggtccgccttccgcagcgcgctcgtcgaagcctccttgcaacgcgtcggcatcgagccggtcgcgcgcatcctgagcccggaactcggacacgaacccggctgagaagatgccggccggaatggccaccacgccgattgacaggagcatcgtgcagaagccgacgaggcgcccggcggccgtgacgggcacgaggtcgccgtagcccgtggtggtgatggtggtcatcgcccagtacatgcccgtgaacacgctgtcgaacttctcgggctgcacgggatgctcgatttcgtacatgagcacgctggccgttacggtgagcagggcgagcaccatgaatgccgccacgatctccggacggcgctttcggaacacgcgcgcgatggagcgcagaccgcgcatgtagcgcgacagcttgataaggcgcacgaggcggatgatgcgagccgcgttcagcatggaggacgacacgggcacgaacagcacgagcagaccgggcgcgaaggccagcaggtcgatgatccccatcggcgacagcgcgtagcgcatgcgtgcgcgagcgggcgatgcgtcgggatggacgaggtcggcagtccacaggcgcgcggcgtactccaagccgaagcacacgctggacgccagcccgaaggccagaagcgccgccgacaccccggccgggatgccgggctgcgtctcggcgaacacgaggatcgcgttcgcgacgatgagcgcgaacagcgcgatgcccacgacgcgcgcgacggcgttgccgcgccgcacgtcctcgagcgcaaagtacgcctcccgcttgaacgccgagggggcgcggcggggcgcgcgcttcgcatcccgcgcaccccccgcatgccctgcgtttcgcctcgctgcgcccatcgcgtcggccccttacgcctgctcgagggtcacggcagtgccggaggcggtcaccatgagcatgttgccttgacccagcacctcgtagtccatgtccacgcccaccacggcgtgcgcgcccatggaggccgcacgctgctccagctcctgcagagcctcgttgcgggcctgcagaagctcctgctcgtagccctcgctgcggccgcccacgatgttgcggatgcccgcgccgaaatcgcgcaggaagttgatgccggtgataacctcgccgaacacgatgccgtagtagccggtgatgcggtagccttcgacggagggggtagtggtcacgatcatgggcgttcctttcaacggacgagtgaaccgatgcgctttgcgtgtccgttagcataccacgatcagcgcggagccgagggtgtacaatagcaacgtttacctgcacctatgccaaacatgcacgaaaggcaacctatgaccgtcgacctcgtttcgctcgccatcatcgcgctcgtcgcggcagcctgcccgatcgtcgccaaactcatccccaacaagctggttcccgagacggtgttcctgctcatcgccggagcgttgctggggccgaacatgacgggcgccatcgtgctcaccgacgcggtggggctgctgtccgacctcggcctggcgtttttgttcctgctagccggctacgagatcaatccgaagagcctcaccgggagccagggcaagcgcgggctggcaacctggtgcgtatccatcgtcctggcgttcctcttcgtgcatttcgccagcggcctgttttccaacgagctcgagtcggttgccatcgccatcgcgttgaccacgacggcgttgggcacgctcatgcccatcctgaaggagcgcggactcatgggaacgcaggtgggcgaatccgtcctcgcatacggcacctggggcgagctgggcccggtgctggccatggcgctgctcttgtccacgcgcgcggaatggaagaccgtgctcatcctgctcgcgttcgtcgccttgtgcgtggtggcggccgtcgttcccgcgaaggcgaagaaggccgggcacaagctgttcaacttcctcaccgagaacgcggaaggcacctcccagaccatgatgcgcgtcaccgtgctgctgctggtggggctggtggcgctctccgcggcgttcgacctcgacatcgtgctgggcgcgttcgccgccgggttcgtgctgcgctacatcattcccgagggcgatcacgcgctggagcataagctggacggcgtggcgtacggcttcctcatccccgtgttcttcgtcgcctcgggcgcgaagatcgacctcatggccgtgttccagcagcctgtggtgctggtcgggttcatcgtgctgctcctgctcatccgcaccgtgcccatattcgtcgcactcgccaccggcaaggacacgcgcagcatctccacgcacaaccgcttgaccatcgccctgtactgcaccacggcgctgcccatcatcgtggcggtgacctcggtagccgtgagcgcaaacgccatgtcgcaggagacggccagcgtgctggtggccgccggcgccatcaccgtgttcctcatgccgctgatgggcatgctcacttatcgcgtggccgacgcgaagcccatcgaggccgtgaaggagatcagccgcaacccgcgcgacatcggcgacatcctgcgcgagcactgggagctggagcgcatgctggcacgcaaggaggcgctcgagcggctggcggcacggcgcgaggagcgcggccgagacggtgagtcctgggaggagcaagcggcgctgctgcaacgtcgctcggcccgcaagcgcgccatcgacgaggcgctcgacctggccgcacaggagatggcgcgtcgcgagctggcgcccgatgcccgtcccgacggagacgacccgctgctggcgcaggctctgcagcatcgcgaagagcggcggcgtcgcatggccgagcgcgttgtgcgcgagtaccgtcggcgcatggacgagatgggtcgtgcggcagagcggatgggactgagcgaagacgacgtcaggcagatgttcgaggacgcgcgacaacgtcgcgacgagcaccccgacgaacgcgacggccggcggcgctagcccgcgcggcgggccgaggacccgttcgcagcctccgcgccgctgtcgcaatcagggaagaacacctccatgcggctggccggcgcctgcttgccggccagcgagcctgcgaccatgcacacgccagccacgacgatgcctatgacgatctgatgcagatcggccactttgaagccgagcgccatcgttgcgcaatacgccagcataccgcccgccatcgaccacagcgcacccgtccggttcgcccgcctccagaacaggccgcacaccatcacccagaaaaacgccgtctcaaggccgccgaaggcgaacatgttgatcttccatatgacgtcgggcggcacgacggccagcacgaacaccaccgcgcccagccccagcgtaaccgcctggctcgacacggacagcgcacgctcccccatgcggcggccgcgcgcttcggcgtaatgcatccacacgtccttgaccagcgccgaggatgacgagataagcagcgaggacacggtggagatggaggcggccaccggccctatgatggcgatgcccgccagcaccggcggcaacgtccgcgagatggccagcgggatgatgttgtccacgctgccgccgtaggccgccagatcctcggtgagcacgccggcggccaacacgccgagcgccgtgacgccgatcatcatggcgccgatgatgacggtgcccacgatcatggcgcggtggagcgatttcacgtccttgtaccccatcgtgcgcaccaccgactgcggcaggacgaacgtgaacacgcccacgagtagccactgggtaaggtacagcgacggcggcatgttgccgccggacgtgggctccagcatctcggggtgattctgcgcgatcgagcccatgatggcctcgtagccgccgccggcgtccaggatgcccgcggccaggaccacgatgcccacgagcatggcgatgccgcagagcgcatcggtcagcgccacgccgcggaagccgccgatggtggtgaacaggatcacggcaacgccgaagagcacgaggccgaacacgtaggagtagccggtcacggcctcgaacagcttcgcaccgcccacgaactgcgcgatcatggtggcgccgaagaacacgacgacgatggcggccgacaagttcgcgagcgcgttcgatccgtagcgagcccggatgacgtcggccaccgtgatcgcatcgagcttgcgcgcgatgagcgccatcttcttgcccacgatgccgtacagcagaacgagcgccgtcacctgcaccacggccatgtacacccagccgaagccgatgctccacgcctggcccggaccgcccacgaacgagctcaccgacccgtacgtggcgatggtggtcatggccagcacgaagccgcccaggccgcggttgccgatgaagtactccttcacgaagccgccgccgtccgacgcgctctgcgtgcggtggcgcacgaccacgctgagccctacggcgaacgcgaggaacagcgcgacggggacgagcgcggcgaggttacccatcgaggccctcctcgtcgtccagcgggaagtcggcgaacacgaaccgcgccagcacgatggcggcgatgaccgcggcgacccatgtgcccatgcaccccgcgattatccacaaaggcgtgccgaacagctggacgtcgaagcctgcgagcccgaacccgcccacgagccacaccgccacgatgacggccagcgctgccgccgtggccttcgcctccctgttcgtctgagcgagcttatcccgatagctcgcaagttccctctgcgccatgcgcgcacctccccgccgtcgccgcgccgtttcgtccaacgtatggtacaccaagcgcagccgtcccgcgcgccccagttggggctagatggccgatgacaccttttccagcaaatcggctttgccgttgacgcccatcttcgcgtagatgcggcgcacgtggctcttcaccgtgttgagcgacaccaccaactcgtcggcggcctcggcgaacgtgcggccctccatgagcaggcgcagcacgtcctcctcgcggcgcgtcaggtcgtaggagcgcgcgaggcgcgcgcaagtggcgtcgaggccggtgccccattccgaccccggcgcggcagccggcgttgcaggtcggggagccggccgatggagctgcagataagccacggcagcggccatgtcgcggttgcgccagcggcgctcgagcagcaggcacgacgggaacgacaagagacacgcgcaggcggcgaacgtcgcggccgcatcgacgccccgcgtatcgagcgccataagcgatccgacaagggtcacgccgaagcaggcagcccacgcgcccgccgcccgatacgccgtgcggttgacgcgcgtgcggaaaaacgcccgcaccaccgccgcgcagaacgcggcgtacacgacgcacgtcagcgccagcaccgccaccgtcaaccacgaaaccatcgccgccccttcccttttgccgcttggatcgtcccagcatagcgcaagccgcccggcgcggccggcagaaccggtgatgaaaaacttcatcattgccgcatcgccgagggtcgtgctaggttggatgcagaagaacacgaagaaggagagccttatgagcgcagcacgcagcagaatcgcacggaccctgatcggcgccgcctgcatcggggcggccacctgcgcgttcgtctggttcgccttccagttcgcccccggcgagccgcgcgagctgaccgtcggagacgagagctacgcgtcgtccatcgaagccagcggaaacagccgatacgtcgcagaagggattgtcgacatccccttcgggcaaacttacaaaaccgatggattgacctggggtaaatggttcagcgtcagcgaggatgaacggagctcctggtccgacgaggagcgcgagcaacgcctcgcgtctgaatcgtacctctacgactccagcggcatcgagttcgccgcacagggactcaagacggtctcgctggaggctttcgcggagtggtaccctcattatgcggagacgacgggctacaccgaggcacgcaagcacgcatgcaaggtactgctcgtcgatatcgcgatgacgaacacaagcgatcatgcccaaacgctcccccgtttcgttctatggagcgaggacgccaacggagcgaacgacacgctggaaaatgggatgggcagcgacaaatacctgttcgaagaaatgtacggcgaatcctccgaccgcggcctcgtggaaaagcacctacccgatggctggaacgtgctcgagcccggagaaacgcgcagttggaccgtaccgtccctcatctacgagaacacgttccgcgatccggcggcctacgagaacatcgacccgtcccgcttctgcgtcgctttggccgactacgacccgcccaccatctatcgcctctggctcggctgaaccagcgcccccttcgtcatcccgagcgagcgcagggaggccccgcgcagcggggacgcgaaggatcccatgcggcgacagccgtggcgcttcctgctgtcgccgcatgggatccttcgactccgcgccttgcggcgctgcgctcaggatgacaacctagggcgtagttactcgcgcacggcgcgctcgcgcttcaaccgtcgaagcttgcgggcgatgcggacgaacccgcacgccatgaggatcatgatcgccgcccacagcacggcgatcggcagcatttccggcaggaaaccgcctctatgcagcaggctcgccgctgtcgtcacctggacgaggagcacggccagcaccagcacctcgatgcggcgcagatgcgcgatcttggagtcgatgtcggagaacaggtcgaagggcgcgccatcgcgcgggcggcgcaggtacgcccagcggccgtacgttccgacgcactcgatgtccagatcgcgcaggaagtccagataacagcggccctcggagctgcccgccgtatgctccagcagctccagacggtactcgtactcccccggcgctccctcctcgaacacgtagcggatcccgcatacgtcgacgagggccagcccgcgcgcggcccaggcgttcagccagtcctcctcgcggtcgaaatcccatgcccagaacagccggtgcatgacccgcttcatgccgaccacctccccacgatctcctcgccgtttcccaccagctcgcgcagccggtcgagctcgacccgcaccgcatcgcggccggcgtccgtcaaccggtactccttcttgcgccccgaccctgcgccgggcgccggctcgatccagcgccgtttctgcagcgtgtcgagcgcgccgtacagggtgcccgccgccaggcgcactcggccgttgctcaggcgctcggcgttttgcatgatgccgtagccgtgcagcggctcgtcgagcgagagcaggatgtagaacaccgcctcggtcagcgcgatcgattccacggttccctccgttccaaaactatatcggcttccgatatagttagtatatcggaagccgatatagtacgcaaccgtgaaaaagaaagcgaccccggcacgctgccgaggtcgctgtcacgcggaggatggggagcaagcgtctacagcgcggcctcgcgcagcttctccaccagctgctcgaccggccacgcgccgaggtcgccctcgtggcgctcgcgcacgctgaccgtgccgttctcgatctccttgtcgcccagcaccaccatgtacgggatcttctggctttgcgccttcgcgatcttcacgcgcatgggctcgttctggtcgtacacctcgatgcggccgcccgcggccttcagctgcttcgccagctcgtgcgccgcctcgttgtgacggtcggccagcggcagcacggccacctgcacgggagccagccacagcggcagcgcgccggcgtagtgctcgatgaggatgccgaggaagcgctcgatggagccgaagatggcgcgatggagcatccaggggcgctcctcggtgttgtcctcggtgcggtaggtcagttcgaagcgctcgggcatgttgaagtccacctgcacggtggagcactgccaggtgcgcccgatggcgtccttcaccttgatgtcgatcttcgggccgtagaacgcgccgtcgccctcgttgatgtcgtaggccagctcgtggcgcgcgcaggcttccttgagcgcgttggtggcgtgctcccacatgtcgtcggttccgatgctcttctccgggcgcgtggagatctcggcctcgtactggaacccgaacgtggacatgatatggtccacgaggtcgaggatggccaccacctcgtccactacctggtcgcgcgtgcagaacacgtgcgcgtcgtcctgagtgaagccgcgggcgcgcagcaggccgtgcacgacgccgctcatctcgtggcggtacacggtgccgaactcgaagtagcgcagcggcaggtcgcggtaggaatgcagctcgctcttgtacagcatcacgtggcccgggcagttcatgggcttcacggcgtactcggtgaggcgcggatcctcgtcggtgccctcgttgatgttgaagaagtacatgttctctttgtagaagccgtagtggcccgaggtcttccacacgtcggcgttgtacacgtgcggcgtgataacctcctcgtagccgcgctcgtacaggtcgcggcgcagccactcctgcatggtgcggatcacgcgcgcgcccttgggcaggtacatgggcagacccacgccggccagcggatccatggtgtagatgcccagctcgcggcccagcttgcgatggtcgcgcttctcggcctcctccaggttgcgcaggtgctcgtccagctccttctgcttgaagaaggcggtgccgtagatgcgggtgagcatctcgcgctcggcatcgccgcgccagtacgcgccggccagcttggtcaacttgaacgcgcccagcttgccggtagagggcaggtgcgggccgcggcacaagtcggtgaacttgccgatggtgtacgtggtgatgacggcgtcctccggcaactcggcgatgagctccagcttgaacggctggcccgcgaagatctcctcggcctcggcgcgcgtgaccacgcgacgctcgaaggcttcgtcggccttcacgatctcggccatgcgggcctcgatggcggcaaagtcgtccggcgacagcgcgcggtcgagcttcacgtcgtagtagaaaccgtcctcgatggccggccccacaccgaactgcacgtcgccgtagaggtcgacgagcgcggcggccatgacgtgcgcggtggagtggcgcagaagctccagcccctcgtcgctcttggccgtgacgatggcaaccgagtcgccttcggccacgggagccgagagatcgaccggctggtcgttcacgatgcccgcgagcgcggccttcgccaggccggcgccgatggacgcggccacgtcggcgacggtggagccgtctgcgagctccttgttcgagccgtcgggaagtacgatgttcatatctgttcctttcctgtgccgggcgcgcacaaagcgcctgcacgatcggttcgcagcgagcgcgccttgcgcccgcctttgcgacaaaacaacgaagccgccccgttgttcgcgaggcggcttcgattgcattgcgaagtggttactgcacgccgtgctcggactgagcggggcgcgcctgcctcgtctgctgctgggtcgccgcctgctgcggctgctgcgttcgagcgccgcgctgctgcggggcacgacgcgtgcgcggaccaccggcaacgggcgtggcgcagtacgggcacacggtccaggtggggtcgagcgcgtggttgcaggtgccgcaaaggttcttgagacgctggtggcagttcgggcacagcacgaagtcggcttccaccgggtagccgcagttcgcgcactcgccgtacttcatgagctcgcgctgcttcagcgcgatctccagctcctgctcgtcgcggtcgatctgcagcagcggcgggcgcagcaagcagtacgcgatgatgccgagcaacgggacgagcgccacgatagcccacacgtaccagtaggaaccgcgcaggtacgcatcgcgcaccacccagacgatggacagcacatacaggatgaccagcagcaccacaaccacggtgaacgcggcttgcagttcaggagtccacagctggttaagcagttcgctcatttcaacctcgttttcttgtatattcagcgactggtgcacaggtatggaaaacgcgcaatacatgcacacgatcagtcattatagcaaagttgccgaaaaacaagctcacgtgcaggtaatttccgcaagctgttgaattcgagggctggttcgagagccgccccctaccagactctgaagctaagcccgggcgcacggaagcgcggccgagccgagccgatgagcgggttcgcggtcgagccgggccgacgcacggtttcggagtgcctgcgtgcagcaaaatcgccggtttggcacgccagacccgcccggatgccatattcccaggaggccgccgaacacgatctggggtttcgcttcggcctttttcgggaaacgaggccgaagttcgtcgagatgtgccaaaccgacgattttgctgcacctcgacaagcgaaaccgtgcggaggcggacgcgaatcaacttccatgacaatgttagcctcgtcaaccgtgccgaaaacggttcccaaatcgcacgatctggaaaaacgccggacgaaataccgcgcgatgccgaacaagacaagagaacggggtcagcgccccatccatcccccgtcgtcctgagcgagtgcggcaagtcgaaggatagcgatagtgacggacgcaactcacaaagaaagcattgaaggtgggtagcgaacttctaggattgatcctcgtcggggacgtactccatgatgtcgcccggctgcacgtcgaatcgctcgcagatgcgaaggatggtgtccgtggtgacggactcccctttggagagcttggcgatggtagttgacgaaagccctatctctgttttgagatcggtctttttataccccatccgcgcaagcatatcgaaaagcttgaaaaacctaatggaagccatcattgttcctcctcgctgctgacagactaccagcaaaccgcagcgtcgaaaagccgaggattaaaagcactatttccttttcatcagctctggattagaatatccgaatatacagatttatttcattagattcggatttgaggttaagatgttccgacagttaccgatcatcgaaactatagccgatgccgtcgacgaactcaccgacgtgcgcatgacgctcagcggcctagcctctttaaccctggcgcttgcgaacagcggcatgcacgagcccgacaccataaggctgatctcctgcctgctagactactgcgcgctcacgaccgaagccgcctccgataaattcgacgaagctccccgtgatacgactcgaccagatcgcctttcataaccgagaaaaaagctatcgaagcatcacgcctgcgtgatatctccatgagttcacctcgttatcagacgcgatccaacccttttttcctgctctttgtcgaaaaatcaaaagaaccgaccttgtgctttcagagcttcgtaatgatccatatctcgcatcttgaacattttggcaggatgacctccggcaacagcaccctttggaacatgatcgacgacgacactcccagcctgtataacagcgccctctccgatatgagcccctccaagaacgatgacttgatccccaagccatacgttgtcttcaatcaccacatctttatcaatcttcgccataccatacggaacggcatcaccgtagtcgaagtcatgaaacgaaccaattatcgaacaccctcttcccgaatgaaaattgctcccgatccgaatttctccttcgccaacaattctcataccgttaaagttaacgttgtctcccagaacgacgcttttcgatacccatgaatagcgattcactttgagacctttgcccaccgtacgcgcacgggttctcacgaccgcaccgaaaagcacctgctttactttcgaaatcaaccgtttcactcagcatcctctctcaaatctattggtcactcgcaccgttcaaataacgagaatccgagagcattgtcatgtctatcaagacatccgcaggaatatccacgcgagcaacccttcccacgacttcccccaccaacgagggcgagatgcccgtgcccggtctcttaaacgtgagcatccccttatctatcacgcttccagcgggtatatccgccgccgcgacaagagaccgacgagcattggcccttgcagcagtttccgattcgctatgtcgtaacgaggaatcgccaagtagtgtttcaacgaagcacacgccttcgaggatcgttcgggcatcagagggatccatggcgtggtaatggtcatttcctggaagcgtcttatcgagcgtgaagtgcttctccacaatgcgagctccaagcacgtaagccgtcttgacaacctcggcagaggggtcgggcttacaatggtccgaataccccacaattacgtctggaaattcccgggtgatcgatgcaatcctgctcaaattagcatgctcgtacggcgttggatattcgagcacgcaatgcagcagagcgagcggactgtcgttcacggcgcgtaccgcctgaacggcagaacgcatctcggtcaagtcgccagccccaaccgaaagaatcataggcttgccttttcgagcctgatgctcgatgaaagggatgttcgtcaggtcggatgaagacactttgtatacccccatcaggggttctagataatcagccgactcgaaatcaaagggggtcgagcagaaacctatcccgatcgagtcgcaatagacggaaagttctcgatactccctctctccaaacgagtcgtatcgcttgaaaagctcgtattggctcgttgaggattcctcgctcgtatcccaatacgaaggagaatgtcgggaagcgagcgattcggccttgtacgtctgaaatttcaccgcatgaacgccagcttcgctcgcttctttgcacatgagctttgccgcctccatagggctgatgccacgctgccgagcgatatcgtaataattgacgccgatctcagctatgagtgtaaacgccccgcttgcaatcctatcctctaagttcatagtacgtctcccaaaacgatcctctttactcttcgtatccctaatctcaaatcgttctcaagcatcagcttgcgcatctctcgccgtacggacctcgcccccgcaagccacgctattgttgaagcgaggtcttcgtcggaaacctcgcttccgagccccaggttgatgaacccgttatccatttgagcaaacgtgtggagctgctcgcgttcgttctccgcgagaacaattgtaggcacgcccatgcaggcaagctcgaacgtggtgcgcccttgggaggaaagagccatgtcggccttacgcatatggtcgctcatgcgcaacacgttgcgactcacctctatcccgcactcaggaacgctttgcaccgcaggattgtcgtatcccgagccgagaacgaaatcaaacgtcacgtccactgcctctgcattatgcctttttgccagttcgtacacccgcgccgtcaaatcgagcggatccgttcctccaaacgtgacgagaatccggcgcacctcatccgaatcttccgaaggctgcgttataaggaactcgtcccgcaagcagacgtaccccttacccgaatacacgtttccatgcggagacgccccttcgtaaatggcgttgacaacagcatcggccaaccttgcgccttcacccaaatcctcgaacgtcaccaagcgcttaacatacctcttcacatcagccataagactggcatcgctatcaaggcaatcgtatacgaatacatcgggacggcgctcctccagccatcggagcatctcttcgtcgtcctccacctctaaaaccggcatattcgccgatttcaacttggcgattccttctctatgacgtgcattgcatacgaatacgacgtcatgctctatcagttcgtacccaagcgttaatgcacggtacacatgcccaaggccaagctccttatgcccgtcgacccgaaacacgatgagccttcgagagagcatggcttcgcacacgatccaatcttgcatcgtgtcgatgtcgaccgcttcgtcagcagggacctcaaaaaccgtaacgttgtcccctatgcgagacgaaggcccgatacacgaacgcttcgaaaccaaaaatgcaccggtttcaacatagttcggcggaagctcctgtcgattgagacgtcgttcgtaattcggaacaaaacgattccgaccgtctttgccccagctcaaatgaggagcgtttgtcgcactcaccatcgtatccgaatcggaattcaaaaaccgctcaatcgccgtatcgagagtgcgcactgttagcaaaggcgaggtaggctgcatcgtgatgacgatgtcgtatcgcacaccccgcaacgcttccacacgaaccactgcgtcattcactaccggatcgagcgtaatatcgtctccggaaagttccgggctgcgctcaagagcaacaacgccatcgatctgttctacgaaatccagtatctctctcgaatcagtgctaacggcaacatcggtgatacagctgctctctgctgcacatgaaatcgcatagtcaatcaacggcctgccgtgcataaggcgcatattctttcgtggtatccctttcgagcctcctcgagcaggaatgacagcgagcacgttcctctccacattcatcaaatgaaggcacctttcctggagacgacacgtcgacgaacaaccctttgattcggcgacttttccaacttcttcgcagccctactcgcatccgcacaacaaaaaccttgatcatgtgccgacgtggctagaacgaacacaaagaacagcaagtaatgactcgtcatggtcgaatgcatcaccatgccgacaagaaaaaacggaacccaaacgccagccgtctcttttctggcataaggggcgatgacaatgctgaacacagcaaagtaaaaaattgtatagagaaccccgtgcttaagaagcaagttgatgaccgcgtggtgcggctgcacaaccctgtacccatgcaacgaagcactcgcgagcaaagtgtctttatcgccaaaagggtttccaatgttcatgacgcgccggatgtcgatatcgtatccacgaaaaatcaaaagcggatccttggaaatctgctcgatagcataaagattggaattgaacctgatagcattagaggtatcattcaaacctcgcgatgctaaagaggccgaaacggtatcgcctccgacgacagccgtactccaccaccagctaaacgtcacgattgaaaagaacatgagagcgaagagcaaaaacaacacgacaggatgcacggatctcgaaggctgagaaaccgacccctttcgtcgcgctctgatccatatcacagcatttattaaagcaaagcatagaagcatcatttgatatcccctgctgttgaggacgagagccgcaactacacataccgctacgccaagctttcgcttctcgtaccagcaccagcagaaaaacaggaacagcaccacgccaaaatagttcttgtcgtacgaaccaaaaacataataaggagtttccgcgtcgcggcgaaaaacggaaaccagcacaaccgcaagggcaaggcaataaaagacgcgtttcatgaagggactaatctcgaacgaggacggtcgtatgcaatagaagaaaagaaccgttagcaggagaaaactcgtgtcgatgaacaaatcccgcatggaatagggagaaatcgccatcgtgaggagaatcgaaccagcaaggccgaaaaggcaaaggatcatcggcaacgacatctttgtctcgtccagctcttctcttccaaagagaccggtcgcaatcaccaatactgcggtaagaaccaccgatgcataaactttgtttgccggcgacaagagaaaaagaacaagcagcaaaagaaccatcaagattgagtacacaatgccaatgtgactttttctcgcgctcggcgctgtagtatcagttttttgcgcaatcacgaatttgctcctgtacgaaccatagctcctgaacgtttcatatagaaaagccccactgaatacgtgaataggtaggacaccgcgttagaaatgagcatgagaaggcaaagcacccaaagactaccgacccaagaagagaaagcaatcgaagcggcatacaaaaccaaacggaacagcgacgaaacaacctgaaggcggggcggggcaactttaagaactacgaccatattgaacgagttgacaaccgcaaatatcgatgctgcatttcccaacggcatcaacgacaaggcctggtcataaagcgtaggatagagaatcatcgcgaacagcggcccaatgaagaaggcaatcgcatacatgaaaagccccactgcgagtatgaacagattcactaagtgatacctgcggacggttatcttgactacgccgtcgctcatgtaactgagcatgatggaactgatcggtgaggagaaaaacgagaacgtcttgccgaaaaaggttgcaacgtaataggtcgacacagccgaaggccctaaggccggatacagcagcaaccgatcaacgtacaccgacgaataggtgatgagattgctcgctataagagacacataggtgcgcagcgacgacccaaaaagccttgttttgccatacggttctgaaaacacgtttgagcatcgtgcaaaacatgcgagggcaaatgcttctccaagtatgaacacgaaaggccagaatccgcttgcgaaagcaacgcccatacctaccacataacccaaagcagttaagaggttgactagcaacagcttcttggaattgaaatgaagcctgaacgcgacgagacaatacgccttcacgatactcatacccgtaaggatcccaacagctaacgccatcaatagatccatcgatagaagttgccagcacactatcgcagtcgccactgccagtacgggggcagaaatggataggaggtatttgaagtctcccggtcctattccggctttctcatagcgttcgttgcgaataatcctcgtattgcacaaggtgctcccgaacgacggctcaagcgcgttgacgatccctatcgccaccaggaacaaaccgtatcgatcgccgtcaagcttccacgccaaaaacggatacacgagaagctgcagcgtccctacgagaaccacggtcgcaccgatagtgagagcgaaatcggtcgatgcttttttcaagaagtcttttttcatggtttcacgatcatcgaataaccgttttgccccgatcaggactcaagaaagcctctaacgagccgttccgtattctcgagcgcagcctcgtgccagacgtaggatttcaagctgtcagaaacggattcgacctctacgctcatgcgccccacaaattcagatgcgtccttcacaagctcggccgcacctgacctcatcagcggttgagcaatttcactgtcaaccgtatccaggatgaacacgcgctttctataggctatagcctcgaaaagcaccgtgctcgatatccctacgacaactgtcgccctttgcagataccaatcgatatccccggtctccgcgatctcaaccctggtgccgacctccgtcaattcaggatggacgaccctccacgagtttctttcggaaggatgcagtttcacgacaatgcggtattcgttcgcacgcggatcccgagcaagatcgcacacgaacgaggaaaccgcaccgttgtcataaccctgagacaccaccaagacgaaaggaacgtgctcgtctacctgttctttttcgatgtcgaaagacgctttcaaccctcgctcaagcggaatggatcctacggcgatcatccgtcgatccctatccggcacaacgcattcgtcaatccaatactgaccgaatgcggcgatacggtcaggaaggtatcttccgcagtccggcgcatcaagattgtacgcaatatgaccaggccctatttgcccatgctggagttcgattaccggtatgcccagctcatgaagaacttcgttgcagacgagacagaacaccgagtaatgctcgacctcgacgacgcattcaggttgccatcttgagaagatttcacgaaacgatttcgaaagcgcgtaatagccagtcaccacgtaagaggttcttttagccagagcctcccgatcaatctcgacatcgaattcacactcgagcagccccaccaattccgcaaggtcggacaaaacgcaacgagacgctttctcccactttcttgttgcaagagcaacaagccatctagcctctaggatatccgtgtatatcgtaagatcttcaagggagtcttttacatgggcaagcttatggggacgctccagaatcgagcagtcgtctgcaaggtctcgagccagatcctcgaggaacacgttgcaaacgccgttcgaaccagcggttttcttccaattgcctaaaaagacaaccttcttgccttcccttacccccgtctcgataccgctccgcgattcacccagctgcatgaggagacgaggcaggcttcttgcgatattagcctttgaaaactgcgcatgaaaatcaggatgcccaccgaattcgaaacgtcgaacctgcttgcataccgagtcgaacagccacttcctcagaagatgccaatagtgcatgccatcgacatttcgactgaaaacatcatggcgattctcaaatgcaagaaacgcttgcacgagaagcaccctgttcccgtaatccactccagccacgcccggttcgttcaaatccgtaaacaaactcatagccgccaaaagcttccataagacgagaagcgcttcgcgtccaatattcttttaacatccaaaagcaccttgctttcgtcgggcttgtctccgaagaaagcatcaatacgctcgaagcccagctctttgaactcatcatgggcaaccgcgacaatcaggcaatctgcgttcgcaatatcacccgactcgcgtagctgcatgccgtaaacctgcttcacctcgtctcccgaagcccaaggatccaccaccgacggctcgactccatattcctttagcctcatgacaatgtcgtacaccttggaatttcgaacatcgggacagttctctttgaaggtaatgcccaagacgaccacgttcgaggacttgggagcaagcccaactcgcaccatctccctgatggccgtctcggcaacaaaccctcccatggcatcgttcactcttctgcccgaaagaatgatctgagagtggtaaccgagcttctcggcctcgtaggtaaagtaatacggatcaacgccgatgcaatgcccaccaaccagtcctggtttaaagccgagcgcattccacttcgtgttcatgccctccacgacttcgctcgtatcgatacccatgcggtcgaagaccatggcaagctcgttcatgaaggcaatattgatatcgcgctgggagttctccactaccttaattgcttcagctgttttgatcgaggagaccggataggtgcctgcctctatcacgatgtcgtacacgcgtttgatttcttcaagggactcatcatccatgcccgaaacgatttttcggatagtggtcaaggtatggactttgtccccggggttgattcgctcaggactgtaacccactttgaaatcaacgccgcaccgcaatccggattccctctcaaggataggaacgcatacgtcctccgtgaccccaggatagacggtagattcgaaaaccacgatcgaaccccattcaaggtgacggccaagcatggtcgacgccccaacaaccggcgacagatcgggggtcttgtcctgatcgatcggagtaggaacagcaactatatgaaaacgcgcttcccgtaaacgttcgggattcgacgtgaagtcgacgcctgtggagctgatcgcctcgtcgcctacttctttcgtcggatcgaccccctttcggtacaagcggattttctcttcgttgacatcgaatccgacaacttcgatatgcttagcgaactcaaccgctatcggcatgccaacatatcccagtccgataagggatagcttcgtcttccgctcgaccaaatcttggtacacgctcactttaccgttttcctattctcttcagaactgcatgaaacatctgccaaaacaggcagtagcctgcatatggcttgctcaaaccttcaatctccgtatacaggaaccatgttcccttcactgccgaaaccttattcgcgctgagcgaatcgcttcgcttcctattcgccgccaacacttcatcgaacccatgaagacatccgtacagctttataacctggagccacgttgtcgctgccacaatgacaggataaggaacaagggcattttccgggtagccgggttcgttaccattcgtcccattcatcagcattttcctccagatattttcttaatttctcaaaagagcttgtccgcctgtactgtatcgtgcttctcgacgtgttgaacagctccgcaatctcggtatcgttcattccctcgaagtaatacagcaatatggctttgcgcttttcttccggcaaagtacggattgcttcaagaagcagctttggcgtgattttcttcccggctttctcaaagacggtttcggcggcttcacgtttgaaatattcatcaaacgtatgaagctgccgcgcttcgtctaaggtcatgtcggaaaaggtcacttcctttgccttgtgtctgcgaagttctctatgggtgtcgcaagcttcattgtgcaataccgtattacaaaacttctgaaaagcacactgtttgtaaaactccctgctattaggttccacattctcacctcctttctcgttggaaagttggtggtgcttccccccttttcgcggggcaatacggcgtttttcaaaaacgccgaagattttttgaaatttcttcaaaaattttttgaacgtacaaaatgcgcccgtccgaaaagcccggacgggcgcataggcattgtaagcagtatccagatgattagacagttcatatatataagcgtagtttcccccggtggtgggcgggctttttttgataagtcaataactgtcggattttgtcgatatgctttttgcttcatggcggctacctcctttagccgccgatttcaacagtgataccgcgtcatttcattagaagataaaaagaaacggcggctttgatttttcaaagctgctgcggaaatcaaagaacgacaagcaacagttctgattttgctccaatatggttattaggggcacaaattaaaatcaaaaaagagccgataacagcagtatttcaaactgcatattatcggctctgcgtctgtgcgtctggctcttttaattaaattatttctgttgttttttggctttattatatgtattagctaactgtccacaagctgctttaatctctctaccatgagaaactctcatggtaacttcaagtcctgtttgctctaattgatgtttgaacgcaaccatttcttgtttttgtggtgctctaatttttgaattactcgtcgggttgtattgcagcacgttaatcataacatttttgcccttaaaccattttgcaagttgccttatatctgaggaacggtcatttatacctggtaaaagcaaatacgcaaataccacttttcgattatgcctttgagaataggacaatgcttgcttaacaacatcttcaatagcgtacatgtgcatatgaggaatgatacagtttctcgcagcctgtgttgctgcatgtaaagatattgtcaactgaatttttagatgttcttcgcgcaatttttttaattgattaactggaccaactgttgatacggtaatgccgtcggttggaaagttaagtccatttctatctcgaagaatatggattgggtagcgtcccgaaagttggtgtatcaatccgtttctggagggcgggcgaagcctgcccgagaaaaacggacatcgtctagaatcgtcaatcaccacaaaagacagattcgaaggaaggcgatgcccgctatggacactctactattcaacgaccccgaagtgaaggggctcgcgttcgcgatcctcgaggaatgcaccgacctgcaggccttcgggcgcaggatgctcgagctcctggcgaacgccgcgatgtcggcgaaggccgacgaggcgtgcaacgccccctacggggagcgcgacgaggggcgcgtcaactcgcgcaacggctaccgggagcgggggctctcgaccgccgcgggcgacgtcaccctcaagattccgaagctgcgccgaggctcgttcttccccgaggacctgatcgagcgctactgcagggtggaccgggcgctcgtcgcggcggtggccgagatgtacgtcatggggatatcgacgcgcaaggtggaggccgtcgcgggcgagctcggcgtgaggtcgatgtcgaagtcgcaggtgtcgcgcctgtgcgagtgcctggacgccgaggtggacgcgttcaggaggcagcgcttcgacggggtgcgcttcgcctacctgtggctcgacgccacctacgtgaagtgccgcgtggaggggcgctcggcgtcccaggccgtcgtgaccgcgatcgggctcgacgacacgggccacaagcgcttcgtcggcgtggactgcgtggacacggagagccacgccgggtggaaggcgttcctctccggcctgagggcgcgcggcgtcgacggcgtgcgcctcgtcgtctcggacgcccacgaagggctcgcgaaggcgatagccgagacgttccaaggagcggcctggcagcgctgcgtcacgcacctcatgcgcaacgtggcgggccgcatccacaggaaggacgaccagagaaaggcgcgcgaggccatgaaggccgtcttcgcgcagaagagccccgtcctcgtgcgggcgtgctaccaagaggcgaccgaggaggtgctgaagatctcgagggcggccggaaacgtgctcttggaggccgaggaggcggcgctcgcctacctggcgttcccggccacgcaccgcaccaagatccgcaccaacaacgtccaggagagggccaaccgcgagatcaagcgcaggacgcgcgtcgtgcaggggttcccctcgcgcgagtcgctcatccgcctggtgggagcggcgctcatcgaggccgacgaggagtggtcggcgcgctgcgtcatctccaggccctcgctcgcgcacgcctggaaggcccaggagcgcgaggcccccggcgaggccgaggtgctcgccgcccgcgaggcggcgcgcaagatcatagggagcgccattgacccgaaggaggacgaaggctaagattcacctcgcaagggtgccggcgattctccggcgatggccctgatacaccacgattcgggacgcggccatggattgctgcaatcaagttgtcgtaattgaataaaggttctcccattcccataaaaacgatacgatttactttttgacgtatcaatacaacctgctgcacaatttcagacggtgttagattacgaacaaaaccattgcgtccggactcacaaaaaatacagccaacagaacaaccaacttgcgtacttacgcaaacagtcccaccatctcgccgtttaataaaaaccgtttcaatatacctgttatctttcaattcataaacatacttttcagtatcgctacttttatagactttttttgttgatattgatagattttctttgtgaaatggctgtttatacaattccgtatataaggctcttgctttatcctctccaattacttccgacatttctttgtaagtaaatccgtatgggtcattcaatatttccgtaggtgtacttttaggtaagtgtttcatttaaatatccttccttttcaaaattaaaaagtttgtttttcagagtttttgattatgatttctagtttttcaacatcaacgatatgcgttaatttacatttagggcagaaaagaggaaaatttcttaataccgtattataaaatacttgaaccctcgtctttccgttacaaattggacattttatccaatatttttcaagcataatatttctccttttgcgcaaaaaaatgcaggtcaattctcaacatgagcattgacctgcatttatacatataatactacaacaaaattaaggcatagtttttatactatgtctatacgtcgttagttttgttgtatagcatacgcaaaataagcatgacaaaaaagcccatattgaaaatgggaaaaatcttttttgatttcaatgcttatcgaatacgcatgctatgtaacataaacattcccccccccttttatataatattatatacaaaagcagcttgttgtcaacatatatatatatgaattattttggctaactgatagaactacgtagacatatccaagaagaaaggggaacagtaaaatgtaatagggtgaataactatggcaaaaagaccagtaccacgatacgactttaaggcttttggggcagcgataaaggcagcgcgtgagggatgcaaggagagccgcaagaaagtaggcgacgaaatgtttatctcgccgcgctaccttgcgaacattgagaacaaggggcagcacccaagtttacagatattctttgagctgatacagcgttaccatatatccgtagaccaattccttttagaaacgccgccggagaagaacacgcagcggcggcagcttgacgcgcttcttgacggtatgagcgatacaggcatacggattgtaaccgcaacggcaaaggagatttccgaagtcgaaaaagagggcgaataggaatgtccgacttaaaactgaacaggatttagaaagcgttgtaatcttttttgaggttgcagcgtttttcttttgcgtaagtttggcaaaatcgctttttctccgtagtaggtgataagagcctaaaggataaaaacattcgtagcacaggtcaaggtcgacccactcgtcgaatgtgatggaatcgcggttgcgacgggtttgccagtagcaggtcatgcccggcttcaccagcaacctttggcgctggtagtcgtcgtaagtcgcaacctcagccggcaatgcgggacgcgggcccacgatgctcatatccgagcgcaggacattgatgaactggggcagctcgtcgagcgacagcttgcgcagccacttgcccacgcgggtgatacgcgggtcctcggcgatcttgaataccgggccggtcttctcgttgagctccctgagctcggcgagcttgtcttcggcatccacgcacatgctgcggaatttcagcatccggaaggttctaccgtccttgccaactcgctcctgactgaagaacacggggcccttcggatcgtcgaccttgatgaggatcgagatgatggcgaacagccagcagaacacaacgagcaccgccgcgctaaaaacgatgtcgaacgcacgcttgacaacgcggtacgccaccctgtcctcgatgccggtgactggcgcgctcccaagctcttccttgaggcgccttgcgcgctcgaagctttcggttgagcccccgccgccattgatgtcgtacgcgaaaccgctacgaacagttttacgctccaaggcaccgctgtccgccgtcgctcggctggctttgcctgacgacgattcccgcatgccggacctcgcctgcgcgggctcgcaaacggccgtgaaatcactggccactatgcgcacaccgccttaaaaacgggttttgcaagaaattgccctcctatgctgccaacgcgtttacaattgaacccagaaatgcggtgcatccgcaggccgctcgcgaaacagctcacgacctgcgaaaacacctttcctttgttcgtgctagatttggcgggaagcgcgaacgcaccatggattcctcagagaattccgggcgcgtttttaatatgcgcaaagggatagagccagcaagcacgttgaggaactggggcagctcgtcgagggaggtcctgcgcaggaagcgcccgactcgcgtgacgcggggatcgtcctccaccttgcgctcgcttctccactgcgccagctgctcagggctcagatgcttctcgacatcgtcggagtcggccaccatggtgcgcagcttgaagatgcgtaacggttggccgcgatagccgatgcgctcttggcggtatatcggcgaaccgggggattcgaggcgaatgatcagtaagagcagcgcgatcggcgccaagccaacaacgaccacgcacagcgagaacgctatatcgaaagcgcgtttaacaaagcggtagaccagaccgttcccggcggtctcagcgacgtgctcctcctcagaaacagcgaacgcgctttccccggcttccgccgctagcgtgccgccttcgagtaaatcttctgttgtcgtttgagtttcaaccaccagcacacgacccttgcggtcagcaccccccccccgttgagcgattcagcctcatgcggacttcctcacgatttccagaccgacgctggcggggacggtacgaccgaacaggctgacgtcgatgtaggcgcgacgcttgtggcggtcgatcttgcggatgtcgccctcgaagcccatgagcggaccgcgcgtgacggtgatcttgtcaccgcttatgtagccctcgctcatgcgcacggtatggttgccgtccatgaacgacaggaaccagtcgcgttccttaccagtgagcgggaagaacgagttctcctcgttgcccagcagacgaatgggcatgggcacgcgcgacagctccctattgagagcctcggggtcatcggtcacgaagaacaggtaccccgggaacagcagccgcttcaccaggcgccattcgccgcggatcttccacatgacctcgtattcgggcatgaagcagtcctccatgacggagggcggtaccaaacggcggcacatctcgagcgtcgaggactcacgacccgcttgcacttgcgccacgtaccacatgcctgctcctttccctcgcacatgtcgaaccgctccgtcaaaagaaaagaggatgaatagctgcgccccgccgccgccctcaggcaacggccgctcatgcagagccggctgcgcatctattcatcctcttgtcgatcgacggaacgcgctttgcgacgatttcgccttctcaagatatgtaacgagccttgcgactcccgtatttgttgctcaaatacaacaatcacggcgaaagaaaaaggcgacgagcgcccttccctcccttaacgatcatgcaatgttgtatatagtccgttgttatatacacaacatccacgatacgctgcgacgatgcgaaacatacttcaaataaaagtcggtctgcgcatcaaggatctgcgagccgtccacgatgtcagccaagagcggttcgccaacaaaatcggcatggaccgcacctatctggcctccatcgaggtcgggcagcgcaacgtcaccctgcagaacctcgcgaaaatcgcgaacgggttcgacatgacgctttccgagttcttcgagggtattccccgcgtcgacccaaatacctgaccatttcgatcagcggttcgttcgtcgcggtctttattatacctacatgttgtataaacacaacaaaaaggtaacgaatgacgataaatccgcaacgagcggcattgccataccaacgccgtcccgcagcgcaacggaatcgcgaggctccgtcgctggtcgagacgatcccctccgtcagtccgccgccaaggcgcacgcctcttgcttgaagagcggatgatcggtacccagaccctgaagctctaacgagacaccgggaagtttggccgtgatctcgagggtgccgcccaggctggtgatgtagcgccgcagcgtctccacctgcatgacgtcgatgctgccgttctccaggtcggagatgcgcttctggctgacgcccatcttggcggcgacctccttctgcgtcatgccgcacgccttgcgcgcctgctgcagctcatagcccttgatcttcgcctcgacgagaagacggccttcctccaacatttcaggagtgatgtcaggacgcgtttcaagaaattcttcgatggaaaggctcttcttcatttctcatcctccaactcgctcaaatgctgtcggtaaagcctatcggctctcggaatagcccgcgcataccaacgattccatcgctcgcgggttccgccagccgatttgtcgcccgccagcagcgtcaccgcacgccgcttcgggtcgaacgcgaacaatatcctgatctcgcttctgccggaagaaggaggtctaagctctttcatgttcttgaacgacgaacctttcaccgtgtccacaagcggccttcccagtcctgggcccacatcgcgaagctcgttcagcgccgccgtcataccgacgatcgtctccttatcctgctccttaagccatggagctatcaggctcaggtcaacttcccagttccccataatatacctcacacgttattttatgtccagcattcctcctcgttcaatgatagcgacgcgatctcacgcgcagatggcagggatctagcgcgggttccccctgaatccagcgcctttcccacgccgccccaacgcggtttccacgcgcggcacctacgaatccaacgcggattacacgcggttcaccgacaaatccaacgcggtttctatacgattcaaaagagccgtcgcccctgcaacacgaaaacgccccctgtgcatcttcgggatgcacagggggcgcaagtaaagctgactacatgagtccgcgatgcttccacctttgaagcgctcgttgatcgcctccatgatggcaccgtcctgcggtcgtttcgctcaggatggcaacgtgcggagccctggcggcttcgtccagaacgacgaatcgcacgggttccttcgacaagtggctcgatggccgaacgccggatcgcaaaatcaaccgcgcacctcgacggcgctccgcacgccctagcgctcaacccaccttcggccgctttccttcgcccggtacatggcaacgtcagcgcgatccagcagcgagcgaacggtgtcatccggccgcacgaagcacacgccgcaacttgccgcaagcgagaacgaccccgcctcagcctggaacgcatggcgctcgatcgcgtcgatctcagcgaacagacgctccagatcgccttccgaaagtcctttcggcgcgcacagcacgaactcatcgccgccgaaacgtccgacccacccgtcgaaagagcgtgagaaactgcgcatcttgctcgcgaagtactgcaaggcgtcgtcgccggcaatatgcccgtacgtatcgttgatctgcttgaatccatcgatgtcgagcagaaccacggcggcctctcccgccggcgatccgccacgtgcagcctgaacgagagattccagctcgttgttgatgaaggtcttgttgtacagcttcgtgaacccgtcgcgcacggcgagttcgttgaacttcgtgatcatttgggtgatctcgatgttgtcgcgcacctcgatgtcggccaccagcaggctgtccgtcacatccttgatcagctcgagcacaagctcggcgccctctatgtccatcggcacgctggtcacgtgaagcacgcgaccgtcgaggtactcgatcttgaacacggcgtcctgcatcgtcaggcaagcgcgcgacgagcagttgagacacggatcgtcctggttccacagctggtagcagggaccgtcgacctcgatcagacgatccccatcgcggtcgtacgcgaacacccggtggtcgcgcggatcgaccaaccggtaataatcgaatctcagcaggtcggtcgcggcgctcgcaacctcaggatggatgctcgcgtacgggaacacaggctaccccagctccgccagctgcgcttccacgcgagccagcttgtcggtcatctcggcatgcttggcgcgatccttctccacgatctcgggcgcggccttcgccaaaaagcccgggttcgacagcttcttgcccagcttcgcggcgtcggcggccagcttcacgcgctccttctccaggcgggcgcgctcggcttcaaagtccaccaggcccgacagcacgatgtacacctcgaggcccggcgccagcgtcacgctggactcggccggcttctccacgtcggcggccatctgaagcgaggccacattgcccatgccctcgatcagcccgcgctgcgcctccaagcgcgcgatgtcgtcctcccccgctttcacggccacggccagctgcgtcttcggcgagatgccgtagcgggcgcgcgtgctgcggatggccgataccgtctcgcacaccatgtcgatggcacgctcggcatccgcgtccacgtactgcgccagcgcatcggcatcgggccatgcggccacgatgaggtacggcgcctccgtgcggtcgataggcagctgctgatagatctcttccgtcacgaacggcatgatggggtgcagcaggcgcagcgcctggtcgagcacgaacacgaggttacgctggcacgccgcgcgatcctcaggcgagccgttcaggcgcgccttcgaaaactcgatgtaccagtcgcagaactcgttccagaagaacgagaacagctcgcgcgtgatctcgccgaactcgaagttcccgtacgcctcgtcgacgcgggccacgagccccgccaggcgcgagaatatccaacggtcggccggcgtcacgggctcgggcgcgcccggcacgtagtcgtcgaggttcatcgtcacgaagcgcgccgcgttgcggatcttgttcgcgaaattgcgcgagctttccagcttcgcctcgttgaacttgaggtcctgcgcacccgtcacctgcatgagcaggccgaagcgcatgccgtcggctccgtagtcctccatgaggcgcagcgggtccacgccgttgccgcggctcttcgacatgggcttgccgtcggcggccatcaccgtgggatggatgatgacgtgctcgaacgggatgcgatcggtgcagtacatggatgccatcaccatgcgcgccacccacaagcccatgatgtcgcgagccgtggacagcacctgggtgggatacgcctgcttcatctgcggcgcgtccatgccctcctcggtccagcccatcgtggcgaacggccacagctgcgacgagaaccacgtgtccagcacgtcctcgtcctggcgcacgggcttcccgcacacggggcacgtctcgacgtcctccaccgacgcgtcctcccagccgcactcgtcgcagtagaacatggggatgcggtggccccaccacagctggcgcgagatgcaccagtccttgaggttgtccagccagtcgaggtacacctgcttccagcgctcggggtggaactggatggagccgtcctccaccacgcgcgccgcgtcctgcttgaggccgtccacggccacgaaccactgctcggactcccagggctcgagcttcgtgtggcagcggtagcacgtcatgacggagtggtcgtggtcctccaccttctccagcaagcccagctcgtcgaacgcggccacgacggcttcgcgggcctcgtcgcggtccatgccgctgaacgcgccgaagccgtccaccacgtgcgcggtctcgtcgaagatattgatgcgctcgaggccgttgcgctcgcccatcgcccagtcgttcgggtcgtgcgcgggcgtggtcttcacgcagccggtaccgaactccctgtccacgtgccagtcggcgaagatggggatctcgcggtcgacgagcggcagtttcaccgtcttgcccacgaggtgcttgaagcgctcgtccttcgggttcaccgccacgcccgtgtcgccgagcatcgtctcggggcgcgtcgtggccaccacgaggtactccaggccgtcctcgggctcggtcagcgggtagcgcaggtaccacaggtgccccgcctcgtccacgtactcggcctcgtcgtcggagatggacgtcgtgcagtgggggcaccagttcacgatgcgcttgcccttgtagatgaggtcgtcgtggtaccagtccacgaacagcttgcgcacggccttcacgtaggccggctccagcgtgaagtgctcgtcggcgtagtcgcacgagcagcccatgcccttgatctggttcacgatggtggtgccgtactccttgtaccagtcgtagcacgcctcgatgaacgcctcgcggccgatttccaaacggctgatgccctggtcggccagcttcttgtccaccttggtctgcgtggagatgccggcgtggtcggtgccgaggatccagcgcgtgggacggccctgcatgcgggcgcggcggatgcacgtgtcctggatggtgtcgttgagggcgtggcccatgtgcagcacgcccgtgatgttcggcggcgggatgacgatggtgtagggctgccccgtgcccgcgcccagctcgggcgtgcgctggaagtagcccgcgtccatccacgcgtcgaaaagcgggcgctcgtgggcggcgaagtcgtagtcgatcttcttgccgctcttgtcgttcgtgttatcggccatgatctgctctttcgtcctcaaagtctctcaaaccgaaaagcgggcgcgccgctcgtccgcgatccgcccgctcgtttaccgtatcctgcgcccgcgctacgcgctttgcaggcttgccgcatcgcccgccggaagagcttccgccccgtccgtcggctcgatgtcgggctttgtctcccccgtgatgtccgtcgcacggatggtcaccgtcgacgggcctttctgctcgggcaggtcgtacatcacgtcctgcagcacgcgctcgcagatggagcgcagaccgcgggcgcccgtgccgtgctccaccgcttcgtgagcgatggctttcaaggcttccggctcgaacgtcagcacggaatcctcgaactcgaacatcttggtgtactgcttcaccagagcgttcttcggctcggtgaggatgcgcacgagatcttcctcggaaagctcgttgagcgacgtcaccacggggatgcgccccacgaactcggggatcatgccgtacttgttcagatcctccggcagcacgcgcgccaaaagctcggcctcggcgtgcttcttgctctcgggcagctcggcgttgaagcccaggcccttcttgcccacgcggtcggcgatgatgtcggcaagcccgacaaacgcgccgcccaggatgaacaggatgttcgtggtgtcgatatggatgagctcctgctgcgggtgcttgcggccgccctgcggcggcacgctggcctccgtgccctccacgatcttcagcagcgcctgctgcacgccctcgcccgacacgtcgcgcgtgatggacaggttctcggccttgcgggccaccttgtcgatctcgtcgatgtagatgatgccgatctcggcgcgcgggatatcgaagtcggccgcggtcatgagcttgagcaggatgttctccacatcctcgcccacgtagcccgcctcggtgagggtggtggcgtcggcgatggcgaacggcacgcgcaacgtgcgggccagcgtctgcgcaagcagcgtcttgcccgagcccgtgggacccagaagcatgatgttgctcttcgccagctccacgtcgccgtctacggcgtccgcgcccaggctgatgcgcttgtagtggttgtacaccgccaccgacagcgcgcgcttcgcctgctcctgacccaccacgtgctcggagagctcggcgtacagctcgtggggcgtgggcaggtcggccagcacgtcctccggcgccggatcggcgaccgaagccgtcacgaccccgtcgcccacccgcgcgtgacggccctcctcggcgtgggagaagccctccgccattgctgcctcgtcgtggcccggaacgctcagccccaggtcgcgcatcatggcatcggcgcacacggagatgcactcgtcgcagatgtagatgccgttcggccccgatatcatggccgccacctgatgcggctgcttgccgcagaaggcgcaggcgatatcggcgtctcggccttcgaattcgtcgtcgcgtctgtcgttcatgtatcctgttcgcttctctactcgtcggtgctcggcgcaaccgcgcgcgaggtggtgatgcggtcgaccaggccgtaggcgacggcctcttcggcggtcatgtagttgtcgcgctcggtgtcgttctggatggtctccagcgtctggcccgtgttgtccgcgaggatcttgttcaggcggttgcgggtcttcagcataaagtcggccacgatggcgatctcggtctgctggccctgcgcgccgccggacggctggtggatgagcaccatggagttcggcaggcacaggcgcttgcccttggcgccgttggacagcagcacggcggccatagaggcgcactcgcccaggcagatggtggacacatcgcacttgatgaagtccatcgtgtcaaggatggcaagacccgcggtcaccgagccgcccggcgagttgatgtacagggagatgtccttgtccggatcggcgctctcgaggtgcagcagctgcgccaccacagagttggccacgttgtcgtcgatctgctcgcccaggaagataacgcgatcgttgagcaggcgggagtagatgtcgtagctgcgctcgccgcgcggggactgctcgataacgtagggaatcagtgctgatttgggatcaaagctcataaggttgcctcgcttgtctcttgcggccgctcggcggcctgcttgcgtttatgccatagtgaggtttatcgctgcgctgtgcaaggccggggtaccgtttcgttacctcgagccgcccgacgacgcgcggatgcgcggccggacggctcgatgtgctcacggtgctattctgcgtcgtcggccttggcctcgacgtcctcgtccttcttcgcagccttcttcggagcggccttcttggcgggcttcttcgcgggctcgtcgcctgcggcctcgtccttcttggccgtcttcttggccgcagccttcttggccggcttcttttcctcgtccttcttcttcgagaggtcgagctcggtcacgacggccttgtccatgatgtccttcacggccttcgtgcggatcacgccctggcgcaccatgtgcagctggccgttcgagcgccactcggcctccagagccgcgggatcctcgacgccgctcttcacgaactcctcggtgacctcctcggccgtagcctccatgccgaagtggcgggcccacgcgtcaagcgcgagatcctgcttggacatgtcctcggcctgcttcttcacgtcctccttgaactggtcgggcgtgatgccttgctgggcgaggtacacgtcgaaggtcatgccctggctctgcagctgctggaagaagtcctggatcaagctggcctccgcgtcctccagcatggcctcggggacgtcgccctccacgcgctcggcgagcgcgtacaggcaggcgttctccttcaggcgcggcatcatgtcggccttctggctggtgacggactcggcgatgcgcgcacgcaggtcctcgacgctttcgaagcccatctgctccttggcccactcgtcgttgacctcgggaacgatcttcttcttgacgaccttgacctcgacctcgaagttaatcttctcggtcttgccggccagcgcggacagcatgatgggcggatcggcgggcatgtccagcgtgaacgtagcggtctggcccttcttcaggcccaccagctgctcgtcgaactcggccgggaacaggttcgcgcccaagccgtagggacggttctcggtcgtgagcgacggaatctcctcgcccttgtcgtcggtggccttcatggccaggtcgatatagctgtcttccttcaccttcgtggcggcggaagcgtcctcgaacgagtagtagtgctcgcgcagggcgtcgatctgctcgtcgatctcggcgtcggtcgtgccttcggcgggcagctcgatctcgacgggctcgtagctggagatctcgatctcgggcttcaccgtgacggtgaacgagaaggtgtagggcttgccggcctcgacgaggtccgtctcgtcgaattcaggcttggcgatggggtacaggtcgcaatcgtcgatggcgagaggataggtgccgttgaccacgtcgtcggtgaccgtcgcgcgcacggcttcggcgcccagggcgttgtcgatgatcgggcgcggggccttgcccttgcggaacccggggaagttgtacttgttggcgaagtccttgtaggtcttcttgatgcgggcatcgatgtccgcggcatcgacggtaacggtcactttcgtgcggttatcttccaatgcctcaacttttgtttccacgtaactatcctccatcattcatatgtcgccttgcggcatcgttcggtgcgactgccttggccttcccttgcagcgatgcgttacgacctgcaaagcaagccaagcacaccgagacggaattatcgcacatatgcgcccagccgggaagtaaagatgaggcaggttcacgaagaaccgacgaaaccgggacgcaaccagggtgcaacggaaacgaaaccggagaaccgcccgttgaaaattccgccagcatcgaaagtcatgctaccatgagacgactttcgacaaggacgcaaggagccccttatgccccaggaccgcaccctcaaagccatcaaatcccgcagccgcagcgagcaggtgtcggtggtctcgctgctgctcctgccgcttttggggatgtgctgcctgctgatccccgacaccgtcaccgacgcgctgccgtatctgctgggaggcctcatggcggtatcgggcgcggcgggcctcgtgtacgcggttgcgcacgcgagcggcgcgcgagccgacgcgcgccgcctcgccgaggagccggccgtgctgggacgggccgtggtcatgtgcgtgctcggcggcgtcatcctcgtgcagggacatgcctccatcagcttcgtcggcgtgatgtggggcctcctgggcctgtacaaggccgccgacgagatcgacgaggtggtgcacgcgctcaagggaaggaggcccttcgcgttgaagctggcattcaccgtgttcgagatggtgctggccgtgctgcttatcatcagcccgttcgcgaacatcgagcaccacgtgctgttgctgggcctggaactgatcgcctaccccttccggatcgagtcgggcgattctggcaagctcaccgtcgaaacggaagcgtagcgccattggacggcaaggaagacgcctcttacccgaatctcgaaggttacaaatcgattttgccctcccgctaatcgcccgatcacggtatcatgaagccgaaagcgaaacgcacccgaaacgcagcagccggaggcttccatgcccaccatcgatctcaacatattgcaggaacgcgagctggcgcgcttgctggactacgagcgcgcaacgtgcaccgtcgacggcgacctcgtgtatcactgcgccttcccctatcgccccgacgacgacctgcaggtagagctcatcgcgcacggcgcgctcatgcagaaaatcgacgaccgccgcggcaccgtggtcaccatcacgtcggacggctactcctactttcccatgctcaaacaggaggaagaggagcgcaagcgccgcgagcgtcgcgaaacgcgcctcgtgggcaccgccgctttgttcgccgccctcagcgtagtcataggctttctgttgggaaagttcttcgcctagctcgcccgaacgccgaagctgcgagcctttttctgctcatgcacgcttttgtcaagcgtatgcgggtccaacgatgcgtttagcttgacaaaagcgtgcatggggaacggatgcgcagccttcgcttcccgcattggtcgaagcgcgccgcgacgtatcttgatggtgcgggcgaaaggacttgaaccttcacgagtttccccaccagaacctaaatctggcgcgtctgccaattccgccacgcccgcacgcgttgcatcgcgcccgaaagcgcgcagcgaccatgataccaaaaacggcgggaaagaaaaccgtcgtccgaacgcttttcgtgcgcgcgccctctttctgctactatgatgcgactcaacgggaaaggaacgcatcatgggaatcaagaaggtcgtccaggcgtggaactcggtcagcctggtgaagcgcatcgtcatcggactggtgatcggcggcgtgctgggcgtggcggtgccgaacatcgaggtcgtcgagctgctgggcacgctgttcgtgtcggcgctgaaaggcgtcgcgccgattctggtgttcttcctggttatcagcgcgcttgcgaacgctcgtgccgccggatcgatgaaaaccgtcgtgctcctgtacgtggtgagcacgttcgtcgcggcgctcgtggccgtggtggccagcttcctgttccccatcgagctcacgctgagcgctccggcggccgaccagagctcgccgtcgggcatcggggaggtgctgggcgcgctcgtgatgaacgtggtgtcgaacccggtggacgcgcttatgaacgcgaactacatcggcatcctggcttgggccgtggtgctgggcatcgcgctgcgcgccgcgtcgcagagcacgaaggacgtgttcgccagcgtgtccgacgccgtgtcgcaggtggtgcgctgggtgatctcgctggcgcccttcggcatcttgggcctcgtgtacaccacggtgagcgcgaacggcctggagatattcaccgagtacggccagcttctgctggtgctggtgggctgcatgctgttcatcgcgttcgtcacgaacccgctgctggtgttctggggcatccgcaagaacccctaccccctcgtgctgcgctgcctgaaggacagcggcatcacggcgttcttcacgcgcagctcggcggcgaacatcccggtgaacatggagctgtgccgcaagctggggctggacaaggacaactactcagtgtccatcccgctgggagccaccataaacatggcgggcgctgcggtgaccatctcggtcatggccatggcggccgcccacaccatgggcgtgtccatcgatctgcccaccgccgtcatcctcagcgcgctggcagcggtgtccgcctgcggcgcgtcgggcgtggcaggagggtcgctgctgctcatcccgctggcatgttcgctgttcggcatcggcaacgacgtggccatgcaggtggtggccatcggcttcatcatcggcgtggttcaggattcgtgcgagacggcgctcaactcgtcgtccgacgtgctgttcaccgccacgtcggagtaccgcgagtggcgcaaagccggcaaggagatcacgttcggcgaggatgcgttcagcgagaacgagctggcgtaaggggaacggttcctctgcaagaagaagggcggctccagggccgcccttcttcttgcacgcgttgctattggtcgaccaccgtcaccgtataggcgttgtcgccgacggtgaagggcttcaacaggttctcgaccagcgtatgcgcctgagccttggcttgctccagcatgttggcctggttcaccttgccctcggcatcttgctgcgccaccttcagcgcctcggccgtgtcttgcttgttctcccagttgaacagcgcgaacgatgaatcgtagaactcgagggagttcgggtcgatctcgatgcccagaagctgcggcgccggcaggctcaccgtgatggcgttgccgctgacctcgacgcgggcctgcgccagatccacgcctgcgcgcacctcggcatcgtagaccatggtgaaggccttcttcgtgatgaagtcgatgtcgccgttctcgtagcgcacgaggccgcggtagtccagcttggccgtggcaagctcgctgcaatcggacagctgctcctggatggacgtggacgacagcgagatgctgggctcgaacgtgcgctgcacggcgagcgttccgaacacaccggccgcgatcagcgcgacggcgacgataaccatgactatcttcttcatgcctctcctacctcgtcagctttcacgctacaaggatatcatgggagaagaacccgaaaacgccgcctcacgacttcaacgaacggttgttgcccgaccgtcacgagccgggatgcgccgccgcgttcgtccatttccgcgcccgcgagttcgcacggcatcgggcagggagtccaagtcctcgacttatgcgcgcctctgccaagagggcgcggtattccgctcgacgccccgagcgcagaccacgagccgtaatcgggcggctccctgcggcgccgatgggaagcctccctgtcggcaccgcacgagaaacccctcgcgggcgattcgcgcttatcggtcgaggcgggcgtaggattggccgtcgcgctgctccaccttgatgccgtccaggtcgtcgagatagggcctgaactgcgcgtagcccagatcgcgcagcttgaacgtgcggaacttgccgcgcacgcgcttgcccagcacggacagcgcgatcccctccggctcggcggcggccacggtctggcggatgaacgcctcggggtcggacggggcagcggcgccttcggcgacagccttcgcagtcgctttggctggacgcttcggtgcgcgcttcgcgggcgcttcggactcccgcttcggcgcttccccgacgggctcctcctgcgtcgccgtagcctcggcgaccggctgctcggccttgggggccttcgccctcgcgggcttgcgcttcggcttcgcagcgggcttctgctcctcggttggcgcggcggcctgggcaggcacctcgccgtccgagcgctcacccttctcggtctgcttcttccccgcctgcttgcgcccttccgagcctctcgagcgagaagcagccgcgcgcatgcgggcggcacgtccgggacggttgtccgagggaggctgctcggcaggctcggcttcgacgacaggttcggccagacgatcatgctgctcgcctgcgggctccgctgagagttccggttcctgaaccggcttctcctcggtagcctcggatccctgctgcgccgcgacctgatccttgcgacgacgcggctgacggcgcgacgcgggcttcttctcgaccggcttcgcctcagcggcgccctgtgcgtccgtcgatccttcagattctgcaaccggcgcgtctttcacgtcgtcggcctgcttggtctcgggtgcctgctctgcctccggggaagcgtccttcggagcgttcgcaccctcagccagcaccacggccaccgagctgccgtccttgatgatctgcacgctggcgaactcgtcgagcagcttcgacagcaggttcgtgccgtagctgcgcacgtcgaagtcggggtagcgcttcagcagacggctgcccacctctccgagccccgtcgacttgccgttgttctggttgtccgtgatgatgttcaccacggcctgctcgatctcgtccttgctcatggtggtggttccagcgccctggccgttcgacgacgagccctggtcgtgacggttcctgttgcgtccgcccgacttgccgcccgtgtcgcccagcagaagctccagcgtggtgaaaatgtcgcatgcctttctgaacggcgtgggcgtcttcttctcgcccatgccgatgaccgtgaggccgctttcgcggatacggctggccagacgcgtgaaatcgctgtcgctcgacacgatgcagaagccctccaccgagcgcgtgtacaggatgtccatggcgtcgatgatcatggccgagtcggtggcattcttgccttgagtgtagccgaactgctggatgggcgtgatggagttctccagcagcgcgtctttccacttggcatggagcgtgagcgtccagtcgccgtagatgcgcttgtaggtgacggtgccgtacttcgacagctcgtcggtgatgggctttatatatttcgccgacacgttgtcggcatcgatcaaaagtgcgaaccgcttttcagacgattgcttgatatccacgtagtgctcctcattccgattgcgggagggccggatgccctgcccctcgggcgtcgactcttcttcgggcgccgcgctaggcagccgttttcgacgtcttggatgattctatactacttgaaagcaagcgatcgacaggcgtttgcaaaatggttgatacattttgctcatattcctcttgcactcccggtagaaaatccgtatactaccaccttgcgccttggtgggtgtagttcagtcggctagaacgccagattgtggctctggaggtcgtgggttcgagtcccatcatccaccccagcgcgagtttgaaaaaagtacttgcaattgctggaaacatgctttaaaataatccagcgctttgcgcacttggaactttgacataggcgttatttctggactgttagcttagttggtagagcaggggactcttaatcccaaggtccggggttcgagtccccgacagtccaccatttgaattctaaaggtcagacatcatgtctggcctttttcattttcccccttctcctctgaattgtgggcaccttgtgtatgatggcggaagcatctgcgacaaaacgctccttcgcgcgtgttggtagcggaaaggagatgggatatggatgtaggttgcgaggctctgggagccggaacgtcccggagcgaccgtccgcttgctgcagcgaacggacgaaaaccgcacgctggccagccgagcggaaccgtgcacgtcctcgacgccgtggcgctcgaaagcgccatggagcgctggggcgacaccgtgcttcgcttggctaccagccgcatgggcagcgtcgccgacgctgaggacgtgtttcaaaccgtgttcatgcgcctgctgcaatcgagagagcggttcaccgacgacgagcatctgaaggcgtggcttctgcgcgtgacgatcaactgctgcaacgacgtgcaccgcagcccctggagcaagcgccgcgccgagcttgacgatgccacgctgtccacgttgcgcgcctccgagctggacgagccgggacgcgaagcgcccgacgacgctttcggcaaccgcaacctcgagcccggcgacttggccgcggctctcgcccgcctcacgccccagcagcgcaccgccgtgcacctgttctacttcgaaggatatgcaaccgacgagatagcgcagatcaccggcgagcgctcaggcaccgtccgatcccacctccaccgcgcgcgcaaggccctcaagatcaatctaggagcgcactcatgaacgaaaacgatttccgcaaggagtacgagcgcatgcagcaccaggtgcgcgcgtcgtccgatctcaaagaacgcacgctagccgccgccgagcgggcagccgaccgcttcgcctcctccgctcagccggtcgcgaccgcgtcagccaagcgcccacatcggcgcgccggatcgcgcagcggcggcgtcgcagttgcgcgtcgctggggtctgcccgccgcagcctgcctcgtcgccgcggccatcgtcgccggcggcgtgcccatggtcatgggcgcgatggacgcggacggccatacggccatctccctgagcgacgcccaacaggcaagcggcttcgccgtgcgcgcctacgcctccgacggcagcgcgccgctcgcgcccggcgaggggggcaccgttgcgttcgaccgcgacttgggctaccgcttctcaggaggcgacgactacaaagtgagcggcttcttcaccggctgcctcttccacgttgagggcgagggcatctcccgcgtgcaggcgaacctgacgggcggagccctgtaccgcgtgacgttcgaagacggaccgaccgaccccgacgacccgcgcatgggcgagctggcaagctggaagcccacggcgcgcggtaccggcgagtactacggcggctacgatttcgtcggaagctccatgcggaacggagagagtaagctgagcctcgcgaagctcatgggttccaccatcgacgtctccgcaagcgacgaccccggcatcgcggacggcacgacgagtttcggcctctggacgaacgagggcgagcctcctgaaaacatcatgggcgacctgcaatcccccgtcatcgacctgttcgaaggacagacgctcaccgtcaccgtgacgttcgaggacgggcgcacgtccacccaggccatcgagctgcacgcggccaacttcgagaccgaaatggtcgacggcaccccccgcctgaccacccgtctcgccgcagacgacgccgaagccccctcggcagcgaaatcgctctacggcatcgtggtgaaagcgggaagcggcccgttccccttcccgctcgacgacgcgaacgaccgcgccgacgaagtgctgcccgcgtcgaccatcgagcgccaggacgatacctggcgggcaaccgtcgaggagaacggcgcgcgcgtcgacgcgaccctgcccgaaaacgcgctcacaccgtccgacggcgaagtcgcgttcgacttcggatacgaaagcaccggctcctctcacccagactccgaaagctcgcaacagccgaccgcgcgcttggccatgagctccccttccatctcgctctccgacactcttccgggcggaaaggcgctcgacgactgcctctttgtcgtggacggatggctgggcaacgcgcgctacatggacaaatgctcgcgcgaggtgtggggctacggctacaacgacgacggcacgcttacgagcgacgactaccgttacgcgtccacgacggtgacgctgcgcaaccttgaagatacggccgtccccgtttggacgcccgtgctctacgatttcgccctgcgcaacgatgacggaacgctcgacatggtgcggacgggttacgatctggacttcgaggcaacgggcgacaccgtgccctccgacgacccccagcacgtcgtcatcgcgccgggcggcacagtgcagctgaccgtggtgcgcgtcctgcccacgtacgtcctggagagcggaaacctggtgctcgtgccgaccgacgacggcagcccgttctcccaggccttctccctcggcgggcagatctagctgccccgccgcttcatcgcggagcccccgcagactcggcctgcgggggctccttcgctccccccccctattcgcgcacgagcttccgggcgccgacgtacgtcaccgcgaagtaggcgccgtacaccgccaggaacgcgccggcgcaggccaacgccatcgacgtgatgtcgaggtgcccgaacacggccacgacgtcggtgaccaccacgagcgcgcacgcggcgtgcgcgacggccagcagcagcgggaacaggaagtacacgagcacctgaacgaacagcgcgctgctgatcatgccctcgggagcccccagctttcgcagcagcccgtagcgctgcgcgttatcggaagcgtcggacagctgctggatggcgagtatggccgcacaggcgatgaccagcacgaagcccaggtagatggccaggtacgccacaatggtggacaggctgatgctctggtcgatcacctcggcgcgcgtcatggacagcgtgatcggccaggtgtcggggttgtcggtgtccgccacggcgtccatcatctcgccgaacgcggcctcgtcctcgtcgcttgcgcactgcacgtcgaggacggactggaggatcgccgatcctgccggcaccgcctcgtcgggcaccacgagcgtgcccgtgttcatcggaaacggcgtggtctgcaggctctcgccccggaattcggccacgcgcaggtcgcgcccgcccacggacagcacggtgccgcgatccaccgcgtcgcggtagaacccgctcgtgatgtcggagtcgctgaaaaccgcgcactcccccgcgcccagctcgagcgccggtcgacccgccagctcgagcgcggcgttcacctgcgacagcttcgccaggtacacggggtacgcgccgtaaccgctgttgacggacgcgcccgcgtagtcggacagcttgaggccgctcgcgcgctccacgtcgtccatcacgaggccgtcggccggatcgaccaaaaagtcgatctgcgccgtgcgggacgccgccgcatcgaagtcgcccgcgcccacggccgccacgctcgcgcgcagccccgcggccatatcgtagccctgccgctcggcgaaggccccgaattcacccagttcggcaggctgatagcccgcctcggcgttgtacgagccgaacgacgtggacacgctggcgctgtagccggtgctcttgtccagcgagccgtcgatggcgttgcggatgccgatgccgccgcacacgctggtgatggccaggaacagcacgaggcacaccaccgacagcgacgcgaacgcggtgttcaccttcgcgttcagctgccgcagcgcgaacatgttaagcccgcgcaggtacagcggcttgatcagctgtaccagcttcaacaggaagcccgacagcgcgtagaagaacagcaccgtgcctgcgcacacgagcaacgtggccgccgcgaattcgggcgagggctccatcagcccgttgtcgatgagcagcttgtacgacacgcctatcagcacgagcgacgccgcgaacagcgcgagcgacagcggcaagctggtcagccgcatctcctcgttcttacgctgcgcgtgcagaaggtcgataagcttcgcccgcgccaccgtgcgcgcgttcaacagcgcggccgtcaggaagatggccgcgaacacgatggcggtcttcgccaacgcgtcggccgagaacacgaacgcgaagccgcccgcctcggccacgtcggcctggaacagcgcgctcgtcagctgcaagagaagctgcgacagcccgatgcccacgacgagccccgccgcaagcgaggccgcgcccgcgatcagcgattccagcgccacgatcttcaccacgtcgcccgtgctcatgcccaaggcgaggtacaccccgaactcgcgcttgcgccgcttgatgaggaaactgttcgcgtacaccacgaggaacacgagcacgaacgcaatgaacaccgacacgccgccgatgaccatgcccagcagatcgaacatcttgctttgcgtctcggagaacgcgagcacgccctgctgggccgtcatggagttgaacgcgtagaacaccgccacgcccagcatgaccgtgaggaagtagatgccgaagtccgccagcgacttgcgcacgttgccgagcgcgagcctagcaagcatggcgcgtcacctcgtccgcggcatcgtcctcgcccgcgccgcccatgctggagaccacgtccacgatgcggcggtagaacgccgaacgctccgtgccgttacggcgcagctcgccgtacaggccgccatccttgatgaacacgatgcggttgcagtagctggccgagaacgagtcgtgcgtgaccatgaggatggtggatccccgctcgttgaggtgcgcaagcgattcgagcagctggcgcgccgatttcgaatcgagcgcgccggtgggctcgtcggccagcacaagatgcgggcgggtcaccgtggcgcgcgccgcggccacgcgctgcttctggccgccggacatctggtaggggtacttctgcagcacatcctcgatgcccagcgtgcgcgccgcctcacgcacgcgcgggtcgatctcgcgcacgggcgccttctggatggtcagcgccagcgcgatgttctcgtacgccgtgagcgtgtccagcaggttcgagtcctggaagatgaagcccaggtcctcgcgccggaacttcgccagctccttgccagcgagcgcggtcacgtcgcgcccgccgacgacgatggtgccgctcgacggcttgtcgatggtggccaggcagttcagtagcgtcgatttgcccgacccgctgggccccatgatgccggtgaactcgccgcacgccaccgcgaagctcacgcggtcgagcgcctgcgtcacgctgccgtcgtgcttgcgcccctcggcgccgtagcgcttgctgagagcgcgcacctccaccaccgtcgacgcgccgacgtcccttgcatccatattcagctccttcttctcgttttgctcctgctcccaggttacgagccgctccttacagcgccttgcagcgcgccttgcggcttccttaccgcaccttgcggctgccttacgatacgaagaagcggattaccgcgctcggccgcatgtgtcatactggcaagcacgaaagagaaaggggttcgacgatgaccggcgcattcggcatggtggagacgcacttgcgcggcaagcgcatcctgctggtggacgacgagcgcgagctggccgacatggtggccaccatcttgcacggcgcggggttcgcctccgtcgacatcgcgaattccagcgccgaagcgctctcctcgatcgcggcgcgcagcgcctcccccgagcacgcgtaccagctgttcgtgctcgacgtgatgatgcccggcatggacggcttcgagctgctcggacgcatccgtcagctgcccgcgcacacctcgacgcccgcgctgttcctcacggcgaaagacgagcctttcgatcgcgtgtcgggactcacgttgggcgccgacgattacatcgcgaagccgtttctgccccaagagctggtgctgcgcatcgccgccgtgctgcgccgctgctatgccgccgagaacccgctgttggagctggctgcgagccgcgtgaacttcgccaccgccgaggtggagcgcgccgacgggcagacggtgccgctcaccgccaaagaacacgagatcctgagcgtgctcgcgcgcaacgccgggcgcatcgtcaccatcgattccctgtgcgaggcgtgctggggcacgtcgttcggctacgagaactcgctcatggcgcacatccgtcgcctgcgcgagaagatcgaggcagacccgtcggcgccggtttcgctcgtcacggcgcgcggactgggctacaagctggtcgagcgcggctagctcatgggccgcgcccctcgcacatctgctcgagaccgtcgcacaaggcgaccggcgggcttcgcgcgcttcttcaccaagcagctgctgctgttcgtggcgctggcgctgctcatcgtggtcatcgacttcttcctgtacgccgtcatcgcctaccgggaatcgaactcgaacttcaacgacggcacgcccgcgtccacgacgcgcgcagtcgaccaagctctcgagcaggatgccgacggctcatggacgcttggggagaacggcctggaggcgctcggccagcaggacgcctgggcgctcgtcatcgggacggacggcgcggtggcctggtcgcaggacaagccggaggacgtgcccgaccggttcagcgtgaacgacgtggcgatggcagcgcattatgcggccgtcgccgactatccggcgtttttctgggatcgggacgacggcctgctggtcgtgggtttcccgaagaacgagttctggacgatgacgctcacctaccccgcgtcgaccgtgcgcaacttcccgctgtacgtgctgctgatattcgcagtcgacctcgggatcttgtacaccatctacgcggtgtcgcgtcgccggacgcaaaacgccgtggctcccatcgccgaagcgctcgacgcgctgtctgacgggcgcgcggccgagctgcacctcaaaggggatctgcgcgacatcggcgaccagatcaccgagacgagcgccgtcatcgagcagaaggacgccgcgcgcgcaagctggattcgcggcatctcccacgacatccgcacgccgctgtcgatgattctcggctacgccgacgcgctcgtgcaggacgagggcgcagccgaagaggcgcgcgcaagcgcgcgggtcatcagagcgcaggggctcaagatcaaggacctcgtcaccgatctcaacaccgcctcgcagctggactacgacatgcagccgatgcgcctggaacgcgtgcatgcggcgcgcctgctgcgcaccgtggcggccgcgcatgcgaacagcgggctggacgaagcgcatcctatcgagctcgacatcgcagaggacgcgctgaacgcggtggtgctgggggacgagaggctgctcacgcgcgcggtggagaacgccatctccaacgcgcggctgcacaacgagcagggatgcacgatcagcgtcgaactggcgctgcgagacaacgcgtactgcacgatccgcgtgagcgacgacggtgctggaatcgcggctgccgacctcgccgcgctcgaagcgcgcctcgcgcgctcgcgcacggcgcgcagcgcggctgggtcgttcaaccgcgatcacggcctggggctcgttctggtcgaccgcatcgcccgcgcgcacgagggatcgctctccctcgacggcgcgccgggcgaaggcttctccgtgaccctcgccctcccgctggcgtagcgacggaagggtttacgctccgcagacgccgatgccgatgaggccggggccggtatgcaccacgagcacggggctgatctgcccttcgtaccaggcgtccacgttgtgcacgcgctgctccagctcgtgctttacttcggccgcctccgcagcggcatcgccgttcaccacggccatcgtgcaacgcggataccgcgccgctgcctcctcggcgcagcgcatggccttcttcagcgattgacggcgacccttggccttcgccacggtgcagtacacgcccttctcgttgcaggtgatcaccgggcgcatgtccagcagactgcccaccgcgtacgtcacgttgcctatgcggccgcccttatgcaggtattccagcgtgtccacgcagaagaacaccttcgtgctctccacgatgcgctcgctgtcgcgtcgcaggtcgtcgagcgtggcgccgtcggccagcctgcgcgccaccgcaagcgcgaccaagcccgcgcccatgccgatgttcttcgtgtccacgatgcagcagtccagctcgggcatcccgacggtgatcgatcgcatgagctcgcatgtggccgacaggccgctcgagatagtgacgatgacggcctgctcgtaaccgtcgtccacgacgcgctgcagcacctcgcgcgcaatcgcaggagtcggcgtggacgtagtggggatctcctcggagaagcggtcgtatacctgttgcggcgtgatggtcactttatcgagaaagctctcgcgttcgtagttcacctgcaacggcacgacgtacatgccgtaccgctcgacgtccgccggcggcacgtcggtgcacgagtcgatgacgagagcgatgcgagaggtgtccatgcgacctgctttcgttcgtccgggcatcgcccgggttactatctagtatcaataactagattattggttgaaacgtactatgtcaagcagttctaaagattgactccaaacggtcgccttgctatgctcgttttgtttcctccgcacgcgcgcgaaaggctccttcatgaacgacgcatccgtcagcacatcgacctatgccgagcatctcgtctccctgcacctccctcgctacgacgagataccctccatcgacctgtacatggaccaactggtgggttttctcgaagacacgctggctccgctgtaccagcccggcgagaagatcatcacgcgttccatggtgaacaactacgtgaagcagggcgtgctggcatcggccgcaggcaagaagtacacgcgctcccacatcgcatacctcatcgtcatctgcacccttaagcagacgttctccatagcggaaatcgaccggctcatccgcatgcaaatcgccagcttcgacacgcgcgtggcctacgactactactgcgatgcgttcgaagccgcgctgcgagcgttgttcgcagcccttccaaccagcccgaaaggcctgatgagcggagaaaatgagggggatttcgagcgggatctggtgctggcttccacggcggctgtcgcctacacgctctacatcaaagcgagcatcgccgtagcgggcgggcggcccaaataacgccttccgctcatttcgtgcgcaaagccgagcggatgcgaccggctcggttacaataaaagggttgatcccatcccaacgaatggaggagcccttggaagcgctcatgctcgccctgctcttgctggcggccgtcctcgtctcgtcggtcatcgaccagctggtgcccaagatctcctcgcccctcatacagatcctgcttggcctcggcatcgcgcttctcgcttcctcgcaaatcaagatcgaactcgatgacaagctgttcctcgtgctgttcatcgctcctttgctctacgacgaggccaagaacatcgacaaggcatcgctgtggcgcaaccgcaagcccgtgctgtcgctggccatcggactggtgcttgccacggcgctcgtcgtggggttcgccgtccactggctcgtgccgtccatcagcttgttcgccgctttcgcgctgggcgcggcgctcggcccgaccgatgccgtggcggtagcgtcgctttccaaggaaacgagcatctcctcacgttccaagagcattctcgaaggcgagtcgctcatcaacgacgcctcgggcatcgtggcgttccaattcgccatcgcagccgccgtcaccggcacgttctccctcgtcgacgccacagccgacttcctgttcagcttcttcggcggtatcctcatgggcatcgccctgggctacctgggcaacttcctagtgcgcaaggttcgctcgtggggcctggagaacacgaccttccacgtgttgttcgaggtgttcacgccgttcatcgtgtaccttgtggccaacgcgctgcacacgagcggcatcctggccgtggtggcggcaggtctcgtgaacgtcatctcgccgcgcatcatcgggccgtccatctcgcgcatgaacatcgtctcgacaagcgtctggcgggtgctgtccttcgcgctcaacggcgtggtgttcgtgttgctgggcacgcagctgccgctcgcctttcaaggaacatgggaaagcacggccgtttcgaacgacaagctcatcgcgtacgtgctgggtctcgccttcatcgtgatcttcgcacgattcgtttgggtgatggccatggaatgggtgcacagccgcgccgaacgcgcagatcgcccgttcgggttggagaacgtgcgcacggctgccgtcatgaccctgggcggcccgaaaggagccatcacgctggccgtggcgttcaccatatcctacgcggtgccgcagcgcgacctcatgatattcatggcctgcggcgtgatcgtagtaaccctgcttctggccacgttcgtcgtgcccctgctggcaccgaagaagccgcccaccgacgaggacctgcgctgcgacgagaccgaggtgagcatcgagatactgcgcaccgtcatcgaggacttggccgcgcgccagaccgccgagaaccgtgcggccacgcagatggtgatccgctcctacaacgaccgcatcgcgcgcatcaaaagccgcaacgacatcgaggacgagccgaacacggccctgcgcctgcaagcggtgcgctgggagcaggagctcgcgctcaagctcatcgacgacgaggagatctaccccatcatcggctaccagtacctcagccgcctcgcccgcatcgagaacatgctgaagcatcatcgaggccgctggtcggctcagaacttcatgctgcgcctgcgagccatagcgcgctcgggatggcaccgcatcgtcgccggactgcccggcatcaacgtcacggaacgcgtgcaggccatccgcgatctgcagatgcaatgcgccgagcacgtggtggagcgcctgcagcagaagctggcctcccccgaatcggacgaaccggccgaggacgtcagcacgctcttgctggaataccagcgttccatcacggccttgcgcaatgccaacccgtccatcaccgccctcacgaacacggcaagcaaggcccaagacatcgaacgctacggcttgcgcctcgagctcgagcagatccaagcgcgctacgaagacggcgacctgtgccgatcctcgtacaagcgcctgcgcgagaatgtcgccctgatgcaggtcgacctggaggacaacgtataaaaaaggccgcccatcgggcggccttccttcgaacgaaacctacatcttggccggagcggaaacgcccagcaggtccagcgtcttggccagcacgatgcgcgtggcgtccacgagggcaagacgcgcgttcgtcacagcctcctcctcgccgatgacgtggcagttcgtgtagaacgaatggaacagcgaggccagatcctgagcgtagtgcgtcaaacggaacgccgcgcggtcgcgagccgcctgagccacgagcgggccgaagtcgtccatcttgcgcatcagcgccagctcggactcgtgcgtgagcggcgagagatccacgttcgccgggatcaccttcgaggccaactcgtccatcgacatgtcgccgttcgcggccgcttcggcatcggccgggtcggccgcctttcgcaggatcgagcagatgcgggcatgagcgtactgcacgtagtacaccgggttcgacgcgtccttcttcttcgccacttcgatgtcgaagtcgatgggctggtcggaggacttcgccagcatgaggtagcgggtggcatccacgcccacctcgtcgatgagctcctcgaacgtgatcatctcgcccgtgcgcttcgacatgcgcacggcctcgccgtcgcggaacaggttcaccagctggccgagcatgatctcgagcgcgccgggccagccccacgcggccagcatggcctcgcagcgggcgatgtagccgtggtggtcggcgccccagatgttgatgaggtggtcgaagccgcgctccatcttgttgtagtggtacgccacgtcgctcatgaagtacgtcatctcgccgttggccttgatgagcacgcgatccttctcgtcgtcgaacgcgctggacctgaaccaggtggcgccgtcctcgacgtagatgtagcccttctcgtccatggccttgaggctgcggtccaccgcgctcaaaccgtcctcatcgggcacgtacagcgagcgctcggagaaccagcatccgaaggtggtgccgaaccgctcggtgacgcggtgctgttcggccaactcgtaggcataggcgcgctcgcggaagttctccatgcgctccttcgggtcggcatcgagccacttgtcgccgtcctcatcgatgatggtctgcgcgatatccttcacgtaagagcctgcatagcacgcctcgggcatctccacgtcgcggcccagcagctgctggtagcgcacggccaccgactcgccgaagttgtccatctgcgtgccggcatcgttgatgtagaactcttcgaacacgtcgtagcccgcatggcgcatgacgcgcgccgtggcatcgcccagagcggcccagcggccatgacccacgtgcaagggaccggtggggttcgccgagatgtactcgaggttgatcttgcgctcgccctcggggatctcgcctttgccgaagtcgtccttttcggcgcgcgccgcagccacgacgccttgcaggacggcgttcgccagacgaatgttgatgaagccggggccggcgatgtcgacggaagcgatcatgtcgttctcgggcaggtggtcgacgatgatctgagcgatctcgcgagggttcttcttggcaagctttgccgaacgcatggcgacggtggacgcccagtcgccgttgctctcgtcgcgcgggcgctcgagagccgcctcgggagcctgctcgagcgtgagcgttccgtcctcgcacgcggccgcgacggccgcgtcgatcagctgttcaagttgttcgcgaatttgcatggtacgcatctttccttagcggatgggtctttcgtttacacgtctcacgattctaccatgttcccgagcgtttggggcacgcagcccccacgcgtttcactcgaatgcccgttatgcagaaaacatacacacgacctcggataatctccgtttcgttgcgcacatatggtacagtgacccagcaaccgacgagagaaaggaccggcatggaattgcgattcgagcatgggaacttcgatgacgcgcgcatcgtacgcacacgcgtgttcatggaggaacagggtttccaggacgagttcgacgacatcgacgacgatccgcgcaccatccacgtaacgctttacgacgcaaacgcccttgtcggctgcgcacgcaccttccccgatcccgaccgccccgatcagccgggtcgctgggtgttcggccgcctggccgtgcttcccgaggcgcgccgcggcggcttcggggccgcgctgctggccgagtccgagcgcctggcgcgcgaggccggcgcgaccgaaatgcacctgcacgcccaatgccgcgtcacgccgttctacgagcgtatgggctacgcgcagtacggccccgtcgagctggacgagcacgtcgagcacatctggatggagaagctcctggatgagacagggggacggggctaatgtctcattccgcaagcataccgcatccgtatcgacagggaatgagacattagccccgtccccctgtctcatccccccccccgtctcattcccgcacgcgaaaaaggatcccccgccgaagcaggggatcctcgaaacgcgtcggttcattgcggctatgccacaggttgcacgcttacgcggtgcccgggataaccatcatcgcaaccgtcaagatgatcacgcaggcgacgcccagcaccacgaacagcttgccgccgaacttcagccacgtggagtattccaccttggccagcgccaaaccgcccatgatagcaccgctcgtcggggtgaacaggttcaccaggccgttgccggcgctgaagatcatgatcatgacgtcggtcgagaagcccagcgagttcgccagcgggcccatgatgggcatggacaccgtggccatgccggacgacgacgggatcaagaacgacagcacgatgtacagcaagaacgacatcggcgcgaagatgaccgccgacaaaccgttcagagcgttcgccgcgttgttcaggatccacatgtcgagaccggtctcgcccataagcacggtgatagaacgagccatggcgatgatcagcacgacgctcatcatatcggcggtgccgttgatgaatgccttgacgaaacggctctcggacacgccacccacgataccgatgatgatagccatgatgaggaaccaggtggaagcctcatcgaagtaccattgacccaacggcagacccgtcaggaacgcggaccaaccctgggagatctcttcttcggccgtgaccgtgccggtcacatcgccgtcgaacgtaatctcgccaccaactttcttgtcggtccaagccgcggagatgtcgtcgccgctaacctgcgtggtgacctcttccgtcgccgcaccggcatcgaacacctcgacgccgaagtcgccccaagggatgaagccgacgatcatgactacgaacgtcagggcgaacacgatgagcgtccacttctgacgacccgtcataagcttctcgttcgggttcgcctcagcggtttcggcttcctgctgtgcctcgccgaactcggccttcatggtttcctgctcctgcagagacaggatggtggaacccttgttggccttgaccttcttcgcgtagcgcatgacgaagacgatggagatcgccagcgtcacgagccacagcaccacgcccagcaggatgatggtgccctggttgataacgatgccggaagagctcaaagagtccacggcagctccgacggcaaacgggttgaccgtcgaaccgagcacgccgcaaccggcacccaacagcacgaccgcggcaccgacaacgctgtcgaagcctgcggcgaccatggtggccgcgagcagcaggtagaatggaaccgtttcctcgcacataccgtacgtcgtaccgccgatggagaagatgaacatcagaatgggaatgaggatgagctcattgcccttgagcttcttcaccagcgctgcgataccggcgtccagcgcgcccgtttccgtgacgatacccaggaaaccgcccaggatcaacacgaacagacaaacaggcagggcgtcggtaaagcccttgacgggagccgtggccacattggcgaccgtggcgccttggaccccttccacaccggccagcgacatcactaccgtgaccagcgccagcacgatcaggatgatcagcaggatggtaaacgatgatatagatcgctttttcttgctcttttcttttgctttctcggtcataacaacccctcctaattatgaggatcgagtcggatattttggcgaacgagaaattttcaagcggatcagtggaagcgtaaccgcagaccgctgtacccctgttgcggtggcatgcgccgaaacgcatgccaccgcccatcgtgcggaagctgggggaagccttccgctcacacgcaaaaaagctttacgccgtgatgacggtgcccgtcttgccttcgataccggcagcggcgcactcgagcgacgtgatgagagccttgccctcggggaacgcgcgcacgtactcgatgcacgcctccaccttcgggagcatggagccgggggcgaactggccctgggcgatgaactcctcagcctcggcaatggtcatcgtgtcgatctcggcctggtcgggcttgccgaagttcacgcaaaccttctcgacagccgtcaggatgaccagcatgtcggcgccgaagtcggcggccagcttggcggaagaacggtccttgtcgatgaccgcgggaacgccctcgtacaggccttccttctcgaacaccggcacgccgccgccgcccgtggacacgaccacgtaaccgccgtccatgaggtccttgaccgcgtcgaactcgacgatgcgcaccggcttcggcgaggcgacgacctggcgccagccgcggcccgcgtcctccttgaacgtccagcccgtctcctcggccttggccttggcctcttcctcggtgaggaaggcgccaaccggcttcgtggggttctggaacgccggatcctcgggatccacgaccgtctgggtcacgacgcacgccgtagaacggttgatgccgcgatgcttcaggtcgttcaggatggcctgggacagctgatagccgatgtagccctggctcatggcgccggcctcggggaacggcatctccggggtcttgccgtcgttggcggacgcgtacgcgaacgcgttgttgatcatgccgacctgggggccgttgccgtgggagaccacgacgttgatgccctcttcgaccatgtcgacgatgttcttcgccgtcgccttcacgagctcgagctgctcctggggcgtgttgcccagagcgttgccgccgagcgcgatgacaaccgacttaccttcacccttctgataaggcatgtttgttcacctagtctttctgagttaggagagcgtcgcgtacatgacggccttgatggtgtgcatgcggttctcggcctcgtcgaacaccttggactgcttggactcgaacacgccgtcggtgacttccatctccgtgacgccgaagcgctcggcgatgtcggcaccggtggtggtgttggtgtcgtggaacgacggcaggcagtgcaggaagatggcgtccttgctggccatggccatgacttcctccgtcacgcggtaaggctcgaggagcttgatgcgctcggcccacacctcgtcgggctcgcccatggacacccacacgtcggtgtagatgacgtcggcgcccgtgcaggcatccttcacgtcttcggtcagcttgatcgtgcagccgttctcggcggcgatggcctcgcaggtctccacgaggtcggcggccggcatgttctccttggggccgcaggcgacgaagttcaggcccagcttggcgcacacgaccatgagcgaacgagccacgttgttggcagcatcgcccatgaacaccagcgtcttgcccttgatgtcgtagttgaagttctcctgaaccgtcaggatgtcagcgagcatctgggtgggatgccactcggtggtcaggccgttccacaccggcacggaagcgccggcagccagctcttccacgtcggactgcgcgaagccgcggaattcgatgccgtcgtagaaacggtcgagcacgcgggcggtgtcctcgatggactccttcttgcccatctgggagctgcccggatcgaggtaggtcacgcccatgccgagatccatggcgccgacctcgaacgcgcagcgcgtgcgggtggacgtcttctggaacagcaggacgatgttcttgccctcgaggtaacgatggggggtaccggtcaatttcaggttcttgaattcgcgggacaacttcagcaggtactcgatttcctcggtggtgaagtcgaggaggcgcaggaagtcgcgaccgctcaggctagtaggcatagatcattcctttcaacgttgcttacagaacaaaacaaaatacgcaccggcggatagagccaagtttccgtccgccccttttcgaacgccagggccgctttgcacggccccggcaatccggaaaaggcaagggtagctctcatagcactcgtgcgcatgcagctgcgcacgagcttggtaccttagtcctcgcgcacaagcggcatgctcatgcagcgcgggccgccacggccgcgagacagctcggcggagggcatctcgagaaccttgaggcccttctccttgagcagcgcgttcgtcacgtcgttgcgctcgtacaccacgatggtgcccggcgcgatgcacagcgtgttcgagccgtcgttccactgctcgcgctcggccgcgatgcggtcgccgccgccgcagggaatgagctccacggggttgccgacgtacttctcgaggatgtcctcgagcttgccgctcatctccttgaccttgataccgtcgccctcggcggtgatctcgaagacggtcagcgggcccatgatgccgggatggatggtgaacttgtcaacgtcgatctgggtgaacaccgtgtcaaggtgcatcatcgcgcggttgttcgggatgttgaacgccaggatggtctcgaccgggctggtctcgtcctcgaagatgttcttcgcgatggcgtcgatggcgtcgggctcagtgcgctgggaaatgccgatggccagcaccttgtcgttgatgttgaggatgtcgccgccctcgatgtggaacgtgttgtagcggctgtagtactcgggaacatccgcgaagtccggatggtttccgaagatgtactcggcgtagatcgtctcgcggttgcgcgtgacggagtacatgcggttgatggacacgccgttgccgatggacgcgaacggatcgcgggtgaagtacaggttcggcatgggggcgatgaccatcttggaggactcgctgacgagatcgaccagggagttcgacttgtcggtgtgaagctcggtgaggttgatgccctccatcgtcttcatgaccaggtcgaggttatcggggtagttctcctgcatatagtcgaagatgatcttctggtagcggtcggtgcggataccggcctcttcgatccactgcttgaggaacttctcgcgcagttcgggtttctgatcgaggacctcggccatgagcttctcgaggtacacgacctccacgccgttgtcgcgcagaatctgcgcgaaagcgtcgtgctcctcctgagcgaccttcagaaacgggatgtcgtcgaacagcagctcttcgagcgtgttcggcgtcaggttcagaagctctcgaccagggcggtggagaagaacttttttcaagggcttgatctcgctcttgacgttcaaaccagccatagcaaccctccttttcctttatgcattttccagattttaggcttgcggaagcgcccgttgcgcaccgggcgtccgttcacctcgccaaaatctcatggttcggatcaaattgcaaccacaaaaacgaaacaaaacggtacccctcgtcatacctcgtggtttttcggcgaatggtcatcacctagccgagtactattcacagtttcttcatatttgctttattgcgataaagtgttgaagtggttgctgaagctggttttcagggctggaacgccccatcgacggacgttgggagtgcatatttgattaactcgaatgcataaacattcaaaaagatgcatttaggatgcaatcgtttcgccacatgccgatcggatgctgagagcacgaggcgtcccgagccgatactcttgcagctttcgagcgcaaaacgccagatatatggctaattttcagccatcgctcccccgccggtgcgctctacgcatccatcggttgcaggagggagttttacggtataataccggtgctcgctgaaacgcgcccgtggctcaatggatagagcaacggacttctaatccgtcggttgcaggttcgagtcctgccgggcgcgccatcttctgcttgcgtcggcgcttcgttcgtacctgccttttttggcaatttgaataaaatttaattattatctcaaacttttttctaaaatacaataggaagttctaagttagtcacaaggcgatgacggacagctctgttttcggacgcaggatgcggcgttgtcaaccgattggcaacatccttcgcaagctaactcgatcttcttattcgatggcgtactattgaaagctctataacctcctagctcatgactattcttagatcgcacatcgagaggagctgcgcatgccgtacatggagaaccatacgttgtactacaagaagcagtgcccgttctgtcaaaaggttctacgcttcatggacgacaacaagatcacgatggacacgcgagacaccttgcaacccggcaaccagaacgacctcgttcgcatcgggggaaagaagcaggttccctgcctcgtcatcaacggcaaacccctctacgaatcagacgacatcatcgcctacctgcgctcgacgaacgcttagcgccgctttcatagcacctgcgccatcgaccgtccgcactcgctgcgggcggttttttttcatgccgaagccttttgcagctcgtccctcccccgatccaccgggagcacacgcgtcgacgagacgccgaacaggcggtaacgatgcgcaatcaagtcgggcgcgacgccggccggcaaagaaaaggccgtgcacactgggtgcacggcctgcaaattcgtggagcgggtgacgggaatcgaacccgcgtcatgagcttggaaggctcaggttctaccattgaaccacacccgcgttttgcgcggcgactattgtaccgcaagttcgcccgatgcgagcgaaattatccgagaagaaccacgaggtgcccatgacctcccctttggacgactacaaccgcaagcgcaacttcgaccggacggccgagccgcccggcaccgcagcgccgcgcgacgacggcgccgccggcgggtgcgacgggcgcctgcgcttcgcggtgcagcaccacctggcctcgcgcgaccactacgacctgcgcctcgaatggaacgggacgctgctgagctgggccgttcccaaaggtccttcgtacaacccccgcgataagaggctggccgtgcgcgtggaggaccatccgctggactaccgcaccttcgagggcaccatcccgcagggcgaatacggcggcggcaccgtcatgctgtgggacgaaggctggtgggagccgcttgtggacgtggagcaggggttgcgcgagggcgacctgaaattcgcgctgcacgggcatcgcctgaaaggagcctgggtgctcgtgcatatgaagccgaagaagggcgagcgcgacgtgaactggctgctcatcaaggagaaggacgactacgtgcgcgcggatgccggcatcgatgggttcgaaacgtccgtgcgaaccgggcgcaccatggacgagatcgcgcgcggggaagacgaggcgttcgccgcgaaccccttcgaccacgtggacgtcgagctggccaagctggtgagctcgacgccgcccggcgacaactggctgttcgaggtgaagtacgacggctaccgcatcgtcgcatacgtcgaaggcggccgggcgcgcctcgtcacgcgcaacggcaacgactacacccgccactttcccgccatcgcgcgctccctggaagactgggcggcgggacgagcgatggtgctcgacggcgagctcgtggtaaccgacgaggccggaaagaccgatttccaggcgctgcagaacttcctgcgcgacccttcgggcaagcaccccgcctacgtggcgttcgacctgctggcgttcgagggagacgatctgcgcgaccggccgctcgccgagcgcaaggagctgctggagtcgctgatgagcgacgcgcccgacaacctgcgctacagcgtgcacgtgcgcggcaacggtgcggacagcttccgcgccgcctgcaagcagcatctcgaaggcgtggtgggcaagcgggccgattcgccgtaccgcggcgttcgcaacggagactggatcaagctgaaatgcggaaacgagcgggaattcgtcgtcggcggatacacgcagtccgccaagcgcgtgcgcgggatcagctcgctcttgctggggcagtacgaggacggccggctcgcgtacgtcggacgcgtgggctcgggattgagcgaagcgacctcgcgcgagctgctggccgcgttcgaaggcctcgagcgaccggacgcgcctttcgccgacgcgccgaagccgcgcccgggcgagcgcgtcgtatggctggacccccaaacgatcgtgcaggtgaaattcgccgaatggaccgaggacggcctgctgcgacaccccagctaccagggcatccgcaccgacaaagacccgcgcgacgtgcaacgggaacccgcatcggaacctgacgagcaaacccccgaccgattggagcgccccatgaattccgacaacgagaagaacggcgagctgcgcatcgacggcgttcgcatcacgaaccccggcaagctgttgttcgaagacccacccatcacgaaggaggacgtggtgcgctactacgccagcatggccgaccgcatgctgccctacgcgtccggccgcatcctcagcatcgtgcgatgcccgcgcggcgcggattcggcctgcttcttcaagaagcatcccgggccttccaccccgggcgtgcgcaccgtggacatccccacgagcagcggcgacgaggagccgtacttctacgtggaggatgccgtcgggctcgtgtcggaagcgcagatggacacgttggagttccatctctggggcagccgggtggacacgctcgaacagcccgacatgatggtattcgacctcgaccccgacaaggggctcggcctcgagcaggtgcggcgcggcgtgcgagacctgaagggcatcctcgacgagctggggctgaagtcgtttctcaagacgagcggcggcaagggctaccatgtggtgctaccgtttcagccggcagcttcctgggacgcgttccacgacttcgcgcggcgcatcgcccaggtgatggccgagaagtggcccgaccgctacacgagcaacgtgcgcctggcgaagcgcaccggcaaggtgttcatcgactggatgcgcaacgggcgcggcgccacgagcatcgccccgtactccctgcgcgcccgcagcggcgcgcgcgtgtcgatgccgctcagctgggaagagctggacgaggcggcgcccgacgccttcacgatgcacgacgcgctcgcgcgcatcgaggacgacgacccgtgggacggctacttcgatgtcgaccaggcgctcgagtagcgaggggctacacgcgcagcgagccgcggaagccgcgcgaggcgtagtaggactcggcgccgttgtggaaggtgaacacgcggttgaagcggcgatcgcagaacagcgcgccgcccagcgcgcgcacctcgacgggcgtttcgatccagctcgatgttttgacgtcgaactcccccagttcctgcagcgcgcgatactgcgcctcggtcaaaagcgcgatgcccatcgcggcagccgcgtcgacggcgttgccctcgggcttgttgcgcttgcgcgcctcccaagccgcacggtcgtagcacaggctcctgcggcctgccgggctttcgggagcgcaatcgtagaacacgtaggcgtctgccgcgtgatcgtaggcgaccacatcgggctggccgcccgtctcctccatcgcgaagagcgagcgcagcttgccgtcgtccgcctccagcttcgcccgcacgctctcccaggcgatgcccggatgaaggtgctcgttgcgttcgaagcgcgcttgcagcgtgtccagcagcgcggcgcgctgatcgtcggtgagagggtgcgcggtttccatggcgggtccttcggtcgcgggcgagtgtttccgccaatagtagagcgacagcccacttccggaagcacagcgtgtgcaatgcgcagcaagccgttaccggacggccatcccgcctacatgggcttgaggtccctcaaggcggtcgagtatccatgcgaggcagctggcgcggccggcatcctggcaccgaagtacggcggagatcaggttgcccgcgcatgattcggagatgttcttcggctgagttctgctatactaactcctgccgttttcgcgtcgggatgtggcgcagtttggtagcgcgcctgctttgggagcaggatgtcgcaggttcgaatcctgtcatcccgaccattttccctcatgcacgcttttgacaagcgaaatcgcttctattgggtgcagatggttgacaaaagcgtgcatcaagcagcaattcacgcaacttcttcaaacgttcgccccgctttcacctgcaacgcgggacgcgagccgcttcgaggatcgaacgcaagcgctcgggccgcatgagatcgtcccagccgatgcgcacgaaccgaaacccgagattccctatggcattttgccgctgtcgctctctttccaaaacttcggcataatcctgccggtacttcagcttgccgtcgaattcgatgacgatggagccgttgtctccaagccgcctacattggagaaagcgcccgaacctgctatcgcttcgatagaggctcttctgtacggcttcagaaggccaaagcccgtcgacgcgaccaagatgcctcccgttcgaagggtcgagaatgttgacctgcagataaggaatttcgaagccaagttcggcgcaacgggcgatcagcaacgactcagccggcgattcgacctggtcggtaaagtacagccctgcctgcaacgcgctgcgcactccgcgttttcttccattggcgaagcagagctgcgcgaaggcgagccacagaagctcggcttccggcgaaacgaatccggtcacgcgcgcagcgctgtagttagcaaggaattcaggttcttccatgtcgagcatgcggatatcgaacgcagagcggctgctcgcttccccgctcccggaggttgcaggctcccatacgagcgcttcggtcgtactctcgtcaatatccctgcatgccacaagaccgccctgcgctttcgcggaagaacgacgcaacagataattcgcagccaaaagcgcatccggcaaaggagaggtcgaggcgcactcgaaaagcgtttgcgctaccgggttcgatggcgtctcaagcgaagcctcgtgaaaagcgcagccgtcctgcttgctcttagcgtggcttcgagcgccgccgaaatgcaaaggcgctccgccgaggaccggcgcgccctcaagagcggctgcggtgatcccccacgctcgaagcttcgcatgcgtcgcaagaaacgcctgggcacgagcccggtatcttccagagatatcgagcgccgcgtactcctgcgcgtccatgtacgcgccacggaacaggcgcacgagacgatgcttttccgcctgctgtcgaagagcttgcctgctcatgctcgaattcgaatgcgtgatgataccgggcacgttgcctcttctcgtagtggcgaaagctgatcatgcagctgatgcacgcttttgacaagcaatcacgcgcttttcaggcggtttcgcttgtcaaaagcgtgcatcaacgtaacattgccgacgcagcctcaccgctcgccctgcgcgagcttcgcgcgcagctgacggagggcgttgccgcgatgggacacggcgttcttctcttcgggcaaggcctcggccagggtgcggccgtcttcgaacatgtcaggaaggaacagcgggtcgtatccgaagccgtgacgccctcgctcctcgcggccgatgcgtccctctatcgtgccgcgcgcgaccgtttcggttccgtcctcgtcgatgaacacgagcgtgcacacgaagcgacccgtgcgcttctcgtcgggtacgtcggccaattcagcaagcagcttggcgttgttcgccgcgtcgtcgcacggctcgcccgcgtagcgcgccgagtgcacgccgggcgctccgtcgagcgcgtccacggcaagccccgagtcgtccgcgagcacggccaagccgccgctggccgcacgggcggcctgcgccttgatgcgcgcgttgccctcgaacgaatcggcgtcctcggccggatcagagtccagccccagctcgcgcagcgtgcggaactcccaaccggggaacgcgagcgccgtggcgatctcctcggccttgtgcgcgttgttgctggcgatgacgatggtcttcatacggtgaagctccttctccttgaacggttgcgctacgaagggaacgcgacgcgtcccacccggtcgatgtcggtacggaacacgcgcgcgccgaagctgcggaattcctccacgtcctcccccgtcgtgtagaagtcgtagctcggctcgtgatcttccgaggccagcgcgccgcggcgcgaaaggatgtgcgccacgtcgtgagccgcctcctgcgccgacgagatcagcgtgacatcgcgtcccaccacgccgccgatgagcgccttgagcagcgggaagtgcgtgcaccccagcacgagcgtgtcgatgtcgcagcggcgcagcggctcgaggtactcgcgggcgatctcctggaacgccggacggatgtacacggtggacacgagggaggtgaaatcctcgatggggccctcggccatgcgcaggccctgctcggctatctccacgaaacgcggcgtggccgtggagaacacggtgatgccggcatcgagatggcggatggccttggtataggcgtccgactccaccgtggccttcgtggcgatcacgcccacgcggcggttcttcgtggcatgggccgcagcgcgggcgcccggctccaccacgccgatgaccggcacgggaaacgtccgctgcgcatgcgacaggccggccgccgtggccgtgttgcacgcgatgacgacgagcttcaccccgcgctcgaccagccacgcgccgatctgctgcacgaagccgtcgacctcgtccaagctgcgcggcccgtaggggcagcgtgccgaatctcccaggtagacgatggattcgcgcggtagctccttggcgatctcgcgcgccacggtaaggccgccgaaccccgagtcgaacacgccgatgggcgcgttgtcgaagcgcggcgcatccgcgccttcgagcggctctatcgttgtctcgttggtatccatcgccccagtataccgcagggttcgttcgttgtttgcaatcgataccggccggtcatagtttctgctaacctggttcacgagcgaaagaagcaagacgagaaacgaggcgaggcccatgaaagttctgctggtcaacgggagtccgaacgagaagcgctgcacctacaccgcgctgtccgaagtagccggcgcgctggaagcgcaaggcgtcgacgccgagatcgcctggatcgggcgcgaccccgttcgcggctgcctgggctgcggcggttgctccaagcgcggcgacaaccgctgcatcttcgacgacgacgttgcgaacgggctcatcgagaaggcggtggaagccgatggcctcgtcgtcggcacgccggtgttctacgcgggagcgaacggcgccctgatggccgtgctcgaccgcctgttctacgccgcctcggcacggctgcgcttcaagcccgctgccgccgtcgcctccgcgcgccgcgccggcactacgcccgccatcgaccagatcaacaagtattttcagatcaactgcatgccggtggtatcgtccaactactggcccatggtgcacggccgaagcgtcgaagacgtacggcaggatgccgagggtctgcagatcatgcgtgtgcttggcacgaacatggcttggatgctgcaggcgacgtccgctgcgcctgcgccgaacgtcgagcagaagatcatgacgagcttcatccgctagcgtgaacgcgagaaagccatggccaaagaacacgaccgcaagacgaacgccatgcgcgtgctcgatacggcgggaacgccgtacgaggcgcgcttcttcgactgccccgaggccgtctcgggcgtggaagtggcgcgcatactgggcctcgatccggacaccgtgttcaagacgctggtcacgcgcggcaagtcgggcgagcactacgtgttcatgatccccgtagcctgcgagctggatctcaagaaggcggcaaacgtcgtgaacgaaaaagccgtggcgatgatccgctcgcgcgagctgctgcccttgaccggctacgtacacgggggctgctcgcctctcggcatgaaaaaggccttccccaccgccatcgacgagacatgccagctgcatgagcgcatcgcattctcgggcggccgcatcggatgccagatcgagatgacgcctgacgacctggcgcgcgcggtgcccctcgccgtggccgatctcaccgtggtgtgaaaacgcctgaacgctaatcattcctattcgcgacgaaaaacgggcccgctcgatgcgagcccgttgcgtaggatcggagcgctgctttaccagtgcgacacaaccgtgtcgcccgacgacagcatgccgtagagctcggctgccttcgacggcggcaggttcacgcagccatggctgcctgcgccgtcggcgtacagcgttccgccaaacgcaggctgccaatcggcgtcgtggaacccaatgtagttaccaacgaacggcatccagtactgcacctcggtctcgtagatcttctcgttgccgttgtagccgattaacttcgacggactctgcttggcgttcaccatgtagacgcccgtcggcgtgtcgtgctcgccgtcaggcttgccggtgatgatgtcggattcccagataacggcacccgacgcgtcgtacaagcgcgcatgctgctcggacaggtcgacgtccatgtaacgagcgccccaatcccggctgcccgcgccgttgtacgcgtcgcccgtctgcgtgcacgggatgtccaccgtgttcgcggcgccgttcgccacgccgtccttcaccaaggcgagcaaggcgtccttgtccacttcccacccgtacgtgccgccggccaccgtgaccaccttgccgtcagaccgtgtgtaggtgcgctgcgtgccgacggtgttgcagacggccgccagctcgtcgacccaagccgtcagcgcgccttcatcgagcgtgaccgccagctcgtcgtcgagcgaaacccattgggagatcaggctcgcgtccacggttccggcgaccgtaccggccatgagcagctcaagatcggctttgatcatggtgttcgccgagtcagccgccgaggtgagcttcgggtcggtggacagcaccgtcggcttcaacagctgctcggaggtcagcttcacctgcgggtcgaggtcggccaccgcttcatcggcggccttgatcaccgcgtcggcatcgagcgccgtgcccacggcttcgggcttgatgacgaaggaggcctgcgcatcgtcgaagccgatcgtcgcgttcacaggctgcgcagctccttcgttgaacgctgcgaccgcagaacggattgcgtcttccagaccggtgccgttgtacgtggccacgagcttggccgtctcgtcgtggtctttctgcagttcgaacggccatgcccacgggttcatgtcggaaagcatgtcgcgtactaccttgccctcgtcgatggacaggcccgcatcgctggccgtgagcttgagcgagaatccctggccgtcgatggacaaggcatagtccttgatggaatcgaccagcactttctcggcatctcccgcactcatgagcgacacgttgatgtcgccgatgttcgaattcggcatgaagcggtcggtgaagtacaacgctactcccgcatacgcgatcagaagcagtgcaatgatcgcgccgaacgttatgccgaggatcttcaagggcttgtgcttgcgctcgacggcgaacgcctgggccgtatcgaccgggcgcatgggatcgagcggcttgaacacctggtcggttgcatagcgcatcggaggctcctgccccgaggcgggtcgcgacggcgaagcggtcggcggcatggcggccgtaggctgcacgggagggacgacgggtttcggtcgcgtttgcggaagaggcccgctgctcgcgccatcgttgcgatgagcgccggcggcgtgacgaccgcgcgacggcttgtcagacttgttttcgctcataatcactctcaaacgtctcggtcttccgtccattgtagcaagtcgggggtaattctcctgtaacaaaacggttcgctttccgaccgggctgcgattgtcacaatttcgacatggggcgtgcacgaggcgtccgcaagctccaccgcgatgccgcagccatcgcttcgttcacggcctcacgatcatccttgacaaacgccggcctgcggatagaatagatgttcgcggcaaagccgcgggaacattgacaaggtgggccttcgaccccgcacttcttctggggggcgactggtttcgacatggtacgtttgaaatgaggagcaggtcgtggtctcctcgccacgttaaacaggggtaccgtcaatttaattggcaagaacaacactcagagcgctccggcgctcgccatggctgcttaatagcgcctggctgtcggccttgggacttccccgcccctcggtccggcatcaacctaggggaatgcgcttgagcacgtagccggtatggctcaggcaaagatcgaaccggctagggtgcgtctcgcttgtccgcgggccggccgcatccgaatcccgaccacggactaagcttgtagagcctcatggagaaggtagtatggaccggagttcgattctccgcgcctccaccaaaagaggaagcgtcgaactcttcttttacaagaatgagtttgcgcttgtgtataggttgggggacgcctgatggcgtcccctttccgtttgcattgacgtgaaacgccgtattttgcgttttaagacgttttaagcccgttggggtactcgtgtacccctcgggcttttttcgtgccttaaaacgcctctgaagcggtctgaggacgttcgagcgcccttgtgcatctcgcgttcgcttgatgcaagaaagcaacgactgcgacaagaggtacacgtgagggctgaccacatgtctgaccacatcaaaatgggcatttggtcagctcttgaaatggaatcccctcttttatcaagggattttttacgttctgaccgcatgaccattttgatgtggtcaggcaaaacgctcataagcaagggggtggggggattcttctgtcctaagcaggtgcgcatttcgggcgcttcgcgtcctcaatgcaagggtggccgccctgcgggcggcagtcggatgtgggcggacgtacagaaggggtgcggcatgggcttgggaggttatgcctatttgtgcgttccgtcgttcgtgcacactaccctgcacaccatgcacactatcctgcacaccatttttggccatagtgtgcagcttaaatcctgatttatcaggggatttaggggtactgcacactatgcacaccattttataagtcttatatatgaaaatatatatatcccctcacgtatatataagtcattgggaaaaaggtgtgcatggcgtgcagggaggcgagaaagcattggaaaaggctcataaacgagagaaaacaagagaaatagcctgcacacttcaatcgaaaatggtgtgcagcgaagtgtgcatggcgtgccgaaggtgtgcagcgcacgtcggaatggcaccctctttccttggcgtacttcttctgcctccgactttttcaggaggcgcgagcgaacttttttgaattgatttctgcccataaacgagcggaaataggctctgagcaggggtaacgaaataataagtgttgcgaagttagtgttaacgccgtataataaaagctgtatagataaatggctcagcacccgtcccgtccttgatgcggggttgctatcgggaataggagccgagcgctcggtcgaatagggccgtgcgtcacgggcgaaacaacgaacacgaagctcccgtggaaaccgagataggcaaggctttgcgcctctgtccctcttcggtttccacgggagctttttttgtttcgcaaaaaggattttgaacatggaggtggctggttatggctaaggcaaagcagcaagtgaaagggtcgaagccctcttatatgacgacgtatgaggcggcggatttcctcggttttaccgcaggcacgctccgcacctggcgctgtcagggcaaggggccgaattattacaaggtcggtagcacggttcgctatgagatggatgaccttgaggcgtggaagaacgagaacgtgaagcacgtcgagctgacgaattaaggaggtgagaacatggaggtaaaagaaaaccgccccgatgcctgcacagcttccgggacggccgattcaatatataaagattttagcacggatgcgcctgatattcaagaggaattgacaggtcccgttcttcccgatgagtgtgcagtggacatcgtgtcgttctgttccgagcagactatcgcgtacgacgatttgttggagtatgcgacgctgttttacctgcaggacaaagaccccgaggacccgccctttcgcgatacgctcaagttcgagcttctgacgctgacgaaccgctgcatcgacgcgtacaactttggcaagcgcgacccgaatgcagctcccggcgcgaagctgaaggacgcctatcccgacaagaaggagggcgcggagcgctacaagcgcctgtcgggtctccataccttgcagattgccgtcatcctgtacaagctgcaccatgcggtgggcatcctttggaacaactcgcatgacgacggcaactttgacatcggcatttatcagtacagcggcgacaacgagggctgctacgacgttggcgagcagaatctgaagagccttatccgcggctattgcaagacgggcaccatcaaggacgtaaacgagaccatcgaggcccttcgcgcgatttgccctcgcgtggagcgctgccgcaatcgcgacttggttgccgtgaacaacggcatctacgattacggcaacaagattctgatggcgttcgaccccgcgttcgtcttcacgagcaagaagcacgtcgatttcgttgaccgtgcccagaaccccgtcatccacaacgacgaggacggcacggactgggatgtcgtgtcgtggatgaacgagctgtccgacgaccccgatgtggtctcgcttctgtggcagattatcggcgcaacggttcgcccgtacgtgagctggaataaatccgcatggctctattccccttccggcaacaacggcaagggtacgctctgcgccctgcttcgcaatctttgcggaccgggcgactggacttccattccgctgaagaacttcggcaaggatttcatgctcacgtcgctgatgcatgcgtccgtgattatcactgacgagaacgacacgggcacgttcgtggacgacgcggcgtcgctcaagagcatcatcacgggcgacccgttccagatgaaccgcaagaaccgcgacccgcgagacgtgcttttcaacggtttcatggtgcagtgcgtcaacgagattccgagggttcgggataagtccgaatccatgctccgccgcctgctggtgattccgttcaagaagcgttttcaaggcaaggagcgcaagtacatcaaggacgactacctgcatcgcaaggacgtcctcgaatacgtgctgtaccacgtgctcgccgaaacggactactacgagcttgacgagccggcggcttgcttggagcttctggacgagttccgtctgacgaacgacccggttcgccagttcctcgacgacattctcatacgggcgacatgggacgttttgccgtggcagttcgtattcgatttgtatcgccattggtttatgcgcaacaacccgagcggacgatgccagagtcgcaaatcgctcatcaatgacgtcaagggaatcatctccgattacgaaggatgggactattcggacaatccggtttccatccccgacgagatgtacgaaacgcctgagggattgattggcatatatgacgtccgtgagtgggagtcggggtatcgaggctcgatttcaagtcgctattactggtatcacggctcgaaacgcactcgcggtctcgttcgcgtaggcgcggccgcttcggaagatgcaacgacagctgattcaacgattgaggaggagtaaatcatgagtttcaaatgggagagcgagaagattgcggagtggcgtctgaaggcacgccacgacggccttgatgagaacgagagattgctctatcaggattaccagcagacccttgcgcttgccggtgcttcagtcgaagcggagaacaaggcatattcgcccaaggcggagaagagcatcgtctttcgcggtgccatctcgttggcattgttggctctaatcggtctgttcagcatttcgggttgcaagctgtccgagttgaatctgctcattccctatacgtcgtatcagctgggctacgcgttgaccggcgagatgccgaatacaaatgaggcgcttacgctgattgctgtcgaaggtctggattttcgttattacgacataaggacgtacgcgaactacatccaatcagaggaagcaaatacgcctttcgatgacatcacgagcagcttccatcatttgctcgttaaggattcggtccgcgatgatttgctaagcgagaacgtattcggcgggtttgccgatgccattcaaaacgatgcggcatttgccgatgtcgtttaccgcaatagcgaggtttatcaagcgataaaacaagccgaggaacaagccaacggcggtaagcagaccatcgaagacctcggcgcagctgagggcggtcgtcagacaatcgaagacctcggcaacggctgagttaaggaggacaaaggaatgaatggtttaggtatcaacaaggcacctaagaacgacaaggacgcggacatcttgacgcccgacgaggtcgcgttgcttcgcactcatgcgagcgatggaacgctcacggcggaagagcgtgagctgtattcaaagcaccttgaggcgatgaggaaattgattcccgaaggcaagaagaagggcaagccgtacgggcttggagtcgcaaagattctggtcaccgtcgccctgattccgcttgcgacaatcactgccataagtttgatacaggcggcaacccgcactcgaacctgggcttggtttgtcaatctgctttcctatgttctggtttatcaccagcttccgccgtattgatagcttgagtttcgccatcccgttttttatttcaatagccggagctatcgcctttcgtgactatgggcgcttggcttcaacacaagataaggaggagtaaatcatgagcactaagaagaagatttccgacatcgacaaggcgattgaggagatgcagcagcgccgcgacgagtgcttcaagcacatcggcaaggcgatgtacgagagctgccccgagctgggcgacatgagcgtcgccgacatgcgcaaggcggggcgctacctgcacaagttcttgaccaagaaggcaccttcgcagggtgtcgctcctacccgagacggcgcgcccgtcgcgtccgattcgggtggcatgtccgcccctgacggacgcgagcctatgccagtggcgggctatggcgagggcatgtagcgaggcagtcgtgcctcctgtccggcaccccgtaaggggtgtccggggtgccccgttccgaatgggatgcttcgccgagtcgtcggcggaagctggttgggaatggggcgcatctgggggttcgaagggggcagtgaaaactgccccctcgcgagcgggacgtgtaacgacaaaacggaggaattttcgacgtagtagaaaaatccgaagttttgtagggacaagtcccatgctcgctccttttttagcgtcgattctgtcgtagaaaatcaacgcgcacgttgcattaaaaaaaggaggtgttttacgtgggtgtgagttcagatatgaggagcagccgcgtgcgccgtcaggcggctaagaagccgaacaaggagcgcacggtccaggttcggttttcggacgaggagcttgccgcgctggacgcgatttgctccgagaaaaagatgacccgctccgcatttctccgcagttgcgtggagaaggtacagggcggggatgttgagccgacgtacgtcgtgacgaggaacgccgacgcggagcgtatggcatccgaggcgaagtgcatcggcgtcaacgttaaccagattgcgagagcgctgaacgcggagtccaagtcgcatccgggttcgctctccccgggcgtgctcggcgaatgcaagacgggtctcgaggaggtgcgcggcgagctgtcgaagctgaccgatgaggtggacggcctgcgcaccgatttcagcaaggatgtgttccgcgccatggtcctgctgtggccggacgttcccgagcagttacaggagctgtgcgattactggtacggcgagcgtggcgggaagattctttctggagggggtggaagctgatgtcgacgacgcacatccagcccctgccgaacgtccgcgggcgcatgtcgtacacggaactcggggagggcaagaagcgcacgcgcaatatccgcgagaagacgaaccgcatcgccgcccagatgggcgacatgggcacccgcgaggacttcatccggttctgctccgccatgcgcaggcagagccaggggacgaggttgaacgagggctacgagcttcgcgtctcgtggtcccccgaggagctttcccgggacagccacgaggacatccggcgggcgtgcgaatacggctacctcctgtgcaaggaagtggccccgaacgccccctgctgggtcacggtccacaccgacggcgagggcggctgcgtgcacgtccatgcgaccatcgcgaaccatgatttggtatccggcacggccatcgcgcacggcaccgaccacgcgaccgtgaagcgcaagaacgaccggctgagccgcgagatggggttcaccgtcgtgggtcccgaacccgccagggagaggaccacatgggccgagcgcaaggggcagttcggcatcgagtccttcgagcgtgttctgggcaatcgcgtggcggacgcccgcgaccatgcgagcaacatggaggagttcctcgaggagctgaaggttcgcggcgtcgagcggaccgagacccgcaaggtcgacgagaagaccggagaggagaccgtgggctggagctacaagtcccgcgacccctacggcaagagcaggcgcaagagaaggcgccgtgcctccaacctcgccgacgacctgacccgcgagggcatcgaggcgtacttcgaccagaagcagcgcgagcttgaggagcaggagcaggacgccccggcaccggaagtccttctcgacgtgcccgagacggcagagccggcagcacagccctctgcagatttcgctctcgacgtgtacgacctcgaccgggcgtacgtgtcggagatggcgtccgaccttcagaaggcgcacatccaccgctcacgcgaggagggcaagcccttcatggacgagcgctatcagcagattgtcgaggcgcacaaccacccggacgagcagctggcgaagctgcgcgaggacgtggacgccgcaaggcgcgagttccatgcctccaaggaggcacgcgacaccctgcaaagcccgtgcccggggcttctggccggcatgcacgtgttcgccaaggcggggcgcaacgccaaggaccccgtgtcccgcatgatggccgacatgacagccatgatgctgcgcatgatgattaaggaggcgcttgacgaggaggctcgcaggcagcgcgaggaggcggagaggcgcgtctacgagtcccgtaggagcatgtgggacgccgagaagcgcctcaaggcggcggagaaggcgctgtccaacgaggacgagcgcgagtccaaggcacatgccaagaccatgcgggcgcgctatgtcagggcgcgaagtgccagcccaagcgcgccgaggtcggcggacaaggacacgcagttcggcgagtagccgaaaagataagggagcagcgtcaagctgctccctttctcaagctcccgctcgcgggctacgaaaagaccttcaaaagggctgttgacgggcgtacacgcaaggggcgaaaaatcggggttttcgccgtccgctcgtttatgagccggattcggaaaacgcggggaacggacggagcgaggcgaaggtgggaagcccgtttggagaccagcaaaagccccgatgaagcccagataaagccccgagagtggcagttgaacatgtacttgtcggcgcgtataattaaatatggaaatacgcaattgattaaatacatagcgaggtgaggatatgaagacgattctggtatgcaatcagaagggcggcgttggcaagtccctggtcgccgacgagattgccttctccttcgagcgctccggcatccccgtgagcttctacgacttggacactcaaggcggcacgttacacgagacgcatgaggcggacggtgcgcaggtcgccgtggtggacacgccgggggccttgcaggaggggctggcggactggctgaaggaggcggacgtggtggtcatcccggccaggaccacgtcgagggacatcgagccgctgatgcgcatgcgcaaggcggtgttcaagaacagtcgcgcgaagattgtctacgtgatgaacgggtggaaccgcttcaaggcgtcccgcgacttcatggagtggttcgagggtctggccggcgaccagacggtggccacgctgccccagtccgaggcgttcgtccaggcgggagccgccggcaagtccgtggtcgagttcgaccgacgcggcaaggctgcgaaggcgactctcgctctggtgggcacggtgcgcgaggctgcgggattcccgaaggaataaccgcaggtcagaggtgttgtccatctggacaaatgagtctcgatgatgtataattgtgcaaatgtgtaaatgattaaaggaggtcgagccgccatggcgaacatgttcgagaaatacgctgccgaccgcgaggccgagcagaagaagatagagaaggccgtcgtcgccgacacggccgctgacgagaagcgcacgacgctctcgctgtcgctcaccgtgggcgacaagaaggcgctcaagctgatggctgcggagcgcgagacgacgattgccgcaatcatccacgagtgggtgcaggagcatctggaaaattaatttgagaggagtaggaattatgttgacaagagaagacgtaatagaaaagctcaagaatggcgaactgacgccgcaggatattgccgcgaacggatggatgtgttctgtgacgcagcgtatcagcaagataaagcagccgagaggcggctatatcaaaccgaaggagttcgagcagatagcgttagacgggggcagcattgatgacctgcatccagaggaaaacgtatctccgggcttggtcggcattgcggtggattatcttactcgattcatgtccgggacttcggccaaagaggcgtttaaggtttccgagctgggtgcgcatgctgttcgacagctgggattgttcgagcagctgttgtcgaatgtgagtggattggatgacgattccattgtcgccgccgtaaagctgtctggatttgattctgcgtacagagctggcgtcatggcgtaccgccctgtggaagacattgagcctgatggcgacacgattgagaacatctgcactatggtcgaacgctcgttgagattcttcgagcagtacggtccgaaagtgctggacggtctgacttttgaaggcggatacaccggctacgtcgctactggtgacggcgattttctgacgaatgacacgctttgggatttcaaggtgtcaaagcagaaacttcaaaacaagtacacccttcagttgctcatgtattggcgtatggggcttcattctgttcatcccgaatacaagcacgtgaaataccttggtgtgtacaatccgcgtatgaatgtggtgtaccgactcgatgtaagcaagatttccgcagatgtgatttcaacggtggaaactgaagtcatcggttattagcagctgattagcccgccgtttcataagagcggcgggctttataattaaatgcgtatttacgcaattcatcatatagaaggaattaacttgaaagcctataagcagaaaagacagggggtggtaaacctatggcacgtaagaagaaattcgcgccgaacgacaacaaccttgcgatagcgtactatcgcttctcgtcccactcgcagaacgacgcgagcatcgaccagcaacgcgagcttgcccacgaatgggcggatgcgcacggcttcaaaatcgtgcaggagtatgaggacgcggcaatatccggcaccacggacgcacgaccggggttccagcagatgctgtcggaagtcgcaaaaatccgtccccataccctcatcatgtggaagaccgaccgcctggggcgcgacaagtacgttctggcgatggcgaagaagaaaatccgcgacgcgggatgcgagattcacctgttggccgagcacatcccgacggagggacccgaaggcgtcctcgtcgaggggctgatggaggccatggcggagtattacagccgccagctgtcgcagaacatccagcgtggcatggactacaacgcgcagcacgccctgtacaacggccacaagctgttcggctacgacgtggacaggtccacgaagaagtacatcccggacccgaacacggcgccgttcgtgcagtgggcgtttaaggaatacgcgtcgggcaagccgctgaaggccattgccgaggagatgaacgcgcagggcctgcgcacgccgaggaacgcgaagttcagcgtgaacatgctgaacaagatgctcaagaaccgcgcctacatcggcgagtaccaccacggcgacatcgtggtcgccggcggaatgcccgtcctcgtcgacgaggcgactttcgatagggcgcaaaggcggttcgccgagaacaagcgcaagggttcccagcgggcgcacggtatggacgacgccgaggctccgcgctattggcttacgggcaagctctattgcggtgagtgcgggagcaccatgcagggcgtgtcaggtacgagcgcgaccgggcggacgtattactactactattgctccgcccagcgcaggaaggagtgccacctgcacaaggcccgcaagcgggacttggaggacatggtgctgttcgccctgcacaacatcgtcgacgacgaggagaacgtgacggcgctcgctctggatgcggcggagtattacgagaagaaccacaacggcaccgcgtatctcgaagcgctggaagcgaagcgcagggaagtggagaagagccttgcgaacctcgtgaaggtcatcgagaagggtgtggtcagcgatacggtgacacaacgtctcgcgcagctcgaggagcagaagagcgccctgaacgatgccatagggacggaaaacgtccgcgtgtcgctgtgcgaggacaggcacagcatccaggcgtacttcgacaagttcctgcacgctgacgtgaacgacccggagattcgagaccaagtgttcgagtatttcgtggacaaggtctatctgtacgacgacaagctcgtcgtgagcatgtggttctccgaggacgacaagcaggaaatcacgtggcgggactggttctcgctggatgagtattggaccgacgaatccccttttgttaaagggggaggcgtcgagttcgactgcttccccctcggctccaccactgacaacaggagccccgtcggcgcgcagccgcggggctcctttgcgtttcctaggctgcgtcaggctacttcttcaaaaaagacgtgaagtcgagcgcgctcttgatgtcgtcgaaggcgcccttgagctcggccgccacggcgatgccgtccttgtagatggcgttcatatcgttcgtggcctcggccacgccttccttcgtgatgcccagatcgtaggggttgtcctcctcttcggcttcttcctcgtcctcttcgacgtagtagtactccgcctcttcgccgtcctccatgagcacgaagccgatgacgtcgccgtcctcgtcctcgatgtagcgcacgatgtcgtcatcgtcgagctcgagctccaccagttcgtagccgtcgtcctcggcgctcggctcgatgatggccacgtcctgcacgtcgtcgtcttggccgtcctccagctcttcgagggcgttcgcctcgtcgacctcagacacggagccggcggtcgcgtcgccgtcctcgttcagcgcatcggcatcgtagctgtcgagcgagccgttctcgtagagctgcgcctcctcgtcggcctcgtcgccgtcgacgatatggaagccctcctcggacaggtcgatgcccgccgcctgcgacgcgacggccgccaggcccccgtcctcgccgtcgagcgacgtctcgccctctccgtcggggccttcctcggcgaagaagccctcgtaggcttcctcgaggtcggtctcgtcgtcggaaggatcgaactcctcgtcgttttggaactcttcgacgtcctcgagttcggtctcctggtcgatctgctcggcttccgtctcggcgccgtcctcgatggtttccagttcctcgtccaagcccatgatggcctccttcgcgtggttcgcacgtcggcgcaaagcgcggcgtggttcgtcgttgcagcttagtagcggctgcgttccttcagcgcgcgctccacctcgcggcgggaatcgcgcgccgccatggtggcgcgcttgtcgtagagcttcttgccgcgcgccacggccagctccaccttcacgagcgagttgtccttgaagtacatcttcacgggcacgagcgccatgcccttctccttgacctgctcctgcagctggcggatctgcttcttgtgcagcagcagcttgcgcttgcggtcgggatcgggattggcgatgttgccgttgaggtacggcgggatgtgcacgttgtgcagccacacctcgccgtctcggatgagtgcgaagcagtcggtgagctggcagtggttgtcgcgcagcgagcgcacctcggtgcccgtcagctcgatgcccgcctccagcgtctcgaggatctcgtactcgtgaaacgccttcttgttcttggcgatggtcttctcttcgcgtttcacggccgtacctactccacgcccgtctcgtcgaactgcatctgcgcagcggactcggcgccagcgccgtcgccctcggtcaccgcgtcgcccatgcccggcacgaagcaggcgtcctcgtccaggtcgcgcgcgaaacgggcgagcagcttcaccgttgcgtcgaggtcgtcgaggctgaccacctcggtgggcgtatgcatgtagcgcaggggcaccgacacgaggccggtggggacgccgccgcgggagatctggatggaacgggcgtcggtgccggtgacgccgggctcggcctcgatctggtacggcagaccctcggcctcggccgccgccacgaggcgctcgaacacagccgggttgatgttggggccgcgcgcgataacgggaccctcgccgcagacgatctttccgtacttcgtcttgtcgatgccgggatagtcggtggcgtgcgtcacgtcgaacgcgatggccacatcggggtccaggccgtacgcggacgtaatggcgccgcgcgtgccgatctcctcctgaacggtggcggccacgatgaagtcgccgggcgcgcggccctccttagcgagcgtctccagcacgcgcacagcgacccacacgcccgccttgtcgtcgaaggcgcgcgagacagccatgttcttgccgaagcgctcgaagcccacgccgaaggtgatgacgtcgcccaccatgacgagcttcttcacacgcttcgccggcatgccgaggtcgatgaccagcttgtcgatgggcgtgacgttcttgcgctcgtcgggctcgatgaggtggatgggcttgcggcccaccacgccgcgcagcggctcgaaggagttcgacgcgtgcacgtccacgcgcatgcccgggaggatggccgcgtccacgccgccgacggacgacacggacaggaagccctcgtcggagatgtacgtgaccatgaggccgatctcgtccatgtgggccgacagcatgagcgacggggccacgcccgtgcccgacaggcgggcatggaccgagcccatgacgtcggtctggatctcgtcggccgtgccggccaggcgctcgcgcaccagttcggccacggcgatctcggtgccggtggccgacggggtctcgagcagttgcttgaggaatttcacctgcttgttcttcataaatgctccctgttctgggcgaggccgcgcgcaggcgcggcgcgttcgttcggtatgggaaccagtatagcccttgcatcgtccgagcagccacctcatcgcggtgatgaagcgaggccgtcaccggagtaccatgaagcgtccggcgccgacggcgggcgttgcgggcctaccagtactctttcttcttcgcgcgcttgcgctcgggcttcggcgggcggaagtccagcgccagttggccgtcctgcgaggcgacggacgctttcttccgctccacgctgtcgatggtccacgacacggcgtccttgccgtacagctccagcatcttgaggcgcgcgtcgcgcaggttccccttcgtgttggcgcgcgagtcgctttcgaactcgaagagccccgtgcctcgcacgtcagcagccgcgggagagatgtaatgggcgatgtaggtctgcatatccttccttcgacggtcgtggttttcgcactgttcgcatgataccccaaggcgacggccgccgctgcgcaacgcgcgagaaaaaggcgcgttcacggccgcctgacggcagcgaaacaagggcgcaaccgcttcggggaagcggcggcgccttccctacaatggcagaaaagacagcaaaggtggacttctatgccaaacactcatttccccgcggcgacccttctgcgcgacacgccgctccccttacccctcgcgcgcatcgaccgcccccgggaagagagcgcggcagctcggcgcgcgcagcatgacgcgcgcagcgtcgtcgcgcccgaggccgggcggctgatcatcgtgtcgaaccggctgccctaccgtttcgaagacgacggcgaaggcggcttcgagctcgagcgcagcgtgggcggcctggccacgggcctgggccccttgcacgagcaggacggcaacctctggatcggttgggccgacgcggatgcgggcatggacgacgacgagcgcgcccggctggccgcggcgttcgacgagcgcgattgccgcgcggtgttcttggacaaccgcgacgccgaagcctactacgagggcttctccaactcggccatctggccgctgttccacgggttcccccagttcacacgcttcaacgaagaagaatgggaggcctaccggcgcgtgaacgaacggttctgcgaggcagtgctggccgaagcgcgccccggcgacacgctgtggatccaggactaccacctcatgctgcttccgtcgatgctgctcgaggcgctgccggatgcgtccatcgggttcttcctgcacatccccttccccgactacgagacgttccgcacgctgccgtggcgcgacgagatcgtccgaggggtgctgggagccgacctcatcggcttccatgccttcgactacgtgcgccatttcctgtccagctgccggcgcgtggcgggcatcgagaacacgagcggcacgctcacggttgacggacgcgtggtgcaggtggacgccttcccgctcggtatcgactacgcgcgcttccgcgacgccgcacgcacaccggaagtgcaagcagcagtggaaacgctcgcggccgagaagggacacgaaggttgcaaggtgatgctgtcggtggaacggctggactactcgaagggcattcccgagcggctggacgccttcgacgcgttcctcgacaagcaccccgagtggaagggtcgcgtggtgctcatgctggtcaccgtgccgtcgcgcgagaacgtggcgtcgtaccgcgcgctcaagaagcgcatcgacgagctggtgggccaggtgaacggcaaacactcaacgatggactggacgcctgtggactactactaccgttcgttgccgttcgagcagctggtcagcctgtacgccgcgagcgacgtgatgctggtcaccccgctgcgcgacggcatgaacctcgtatgcaaggagtacctggcctgccacgacggcgacggaggcgtgctggtgctgtcggagatggccggcgcgtcctacgagctgcacgaggctctgtgcgtgaacccgttcgaccgcgcgggcatcgcccgtgccatgcaggaggcgctcaccatgccacccgacgagcagcgcaagcgcaacgcacccatgcaacagcgcctggcacgctacacgtcgaagaagtgggcgcgcgagttcctcgatgccgtggccgacgtgaagcgccgccaggcgggcatgagcgcgcatctgctgggccccacgtcggccggccggctgctggaggcgtaccgccgcgcggatcggcgcgcgctgctgctggactacgacggcacgctcatgcccttctcggacgaccccgcgcgcgtcgcgcccgacgaacggctgctggacgtgctggcgcgcctgggcggcagcgcggacaacgacgtggtggtggtgtcggggcgcgaccacgccacgctcgaggcatggctgggccggctgcccgtcgacctcgtggccgagcacggcgtttggttcgccgcgcaagcggacggaggcacggcgagcgggcgggcatggacgctgcaggaaccgctcgacaacagctggaaggacgccatccgccccgtgctggccgacttcgtcgaccgcacgcccggatcgctgctggaagagaaggactactcgctggtgtggcattaccgcatgtgcagccaagagctggccgaacggcgcgtcatcgagatcagatgcgcactgggagacggcctggccgaccgcggcatcgcgctcatggacggcaataaggtgatcgaggtgaagccgcgcggcgtcgacaaggggcacgcggcccaccgctggttccgcgaccccgcctacggcttcttgctggcggccggcgacgaccgcaccgacgaggacgtgttcgaagccgcgcccgacgacgcgtggaccgtcaagataggcggcggccccacccgcgcccgcttcgcgctcaagaacagcgccgagatgcgccagctgctggaagcgatggccgaagccgagccggtccgctagaacgcgcaagaggagccgcgaagcgggccgacggccgtcgtttccgcctcgacggacgcatcgtcgccggtcaaaaacgcgagcacgcggctcaacagcgcttccagatcgtcttcggaaagcgtgcgggagaagccgctatcgacgaggttctcgaaggcggcggcgttgcgatagcggatgccgtcgaggaagaacgccttgcgccggtcggcacggtcgcgcaacacgacgacggtctgcgacggcagcgcctcgtaggcgcgctcgtcgagcccgagcttcttcccgtaccagtcgggcacgttgcgcacgccctcgtcggcgaagaacgcgcggatctccccgcaccccgccaacgggtacggcggcaggtcgtagccccgatggcgcgcgtacgcgaatatgtagcgggacgcatcgcccacctgggcgcggtcgcccagcacgaacgacagcagctcgagcgcccgatgaggccgccaccggtcgccttcgagctccaacaagcgcgcgatccgggaaacgacgtcgtcgccggcgcttcgcaggctcatcgcgcctcccctccgacatcaacaccttccgtgtcttcgcgcacacccgccgcgggcatgaggtcgctcagaacctgctcgaacggctcgcgcgcggcacggcgcacgagccgttctttctgacggcgcgtgaggcgcttgaagcggtactcggcgctcatggcctcgtgcttcgtcgcgtaagccgcctgcgcgagcaggcgcacgggaaggcggctgcgcgtgtacttcgcgcccgcgccggcgttatgcgcgcgcacgcgttcggcgacgtccacggtgtagcccgtgtaccatgtgccgtcggcgcattcgagcacgtacaggtagaacgacggatcgttttctgcccggggatccatgcgcgctacacgagcaccttgacgacgatcttgcgcacgcagcatggggcgtcgagcgcgcatcccggcttgtgggcgtcttcgggtgcgagcacggccacgtcgcccgcacgcagcacgatggagctgggacgctcgggtgtgcagtacagcccgaaatcggcgtcttcgtcaaagggctgtactttcgcgaggccttcgagcggcgcatactgcatgacctcctcgcccgacacgacgaactgcacgtcgtagtagcggcggtgcgcctccagctgcttctcctcggcgggaaccgtgtcgtattcctgcacgttggcgaacacggcgtccccgtcgatgtcgacgcggccgagcgggagcgacccgaggtcatccctgttcaaaaaagcatacgccttctgaaaacgcgcggcgaggtaatcgttgccagcggcatggtcgagggtggtaaccagcatgatcggtcctttcggtacgggtgcacggcgcgcaaagcgactcgcagtatacacccgaggacgtcagcgcggacgcaacagaacgtttgcgcattccgcttgaagtctagaaagggatcgtggacggcagcttgagcaaggcagataatgaccgtatcgaccctgcgccgaagagacggcgccgttcatcgaaggagcgaggcatgatcaacaagttctgcaagaagccgctgtgggaatgctcgaaaaccctgtccgccgtcgcccaggggctcgcgcccgccgagacggtgatcaagggcgcgaagctcgtgaacgtgtgcacggccgagatccaggaggacgtggacgtggccatcgccgagggccgcatcgcctacctcggccgggcagaccactgcatcggcgaggacacgcaggtcatcgatgcgaaggggcagtacatcgcgccagggttcctcgacgggcacatccacgtggaatcgtccatgatgggcgtgggcgaatacgcgcgcgccgtcgtgccgcacggcaccacgggcatctacatggacccgcacgagatctgcaacgtgctaggcctcgacggcgtgaaggtgatggaggaggacgcgcggcgcacgccgctcaagacgatgatcaccaccccgtcgtgcgtgcccgccgtgcccggcttcgaggacaccggttcgtccatcggcccggacgacgtggccgagacgatggcatggccgagcgtcgtggggctcggcgagatgatgaacttcccgggcatcctaggaagcacggaccacgcgcatggcgaagtgggtgccacgctggaggcaggcaagatcgtgaccggccattactccatgcccgagaccgaccggggcctgaacgcctacatcgcctcgggcgtgcgctgctgccacgagtcaacgcgccccgaggacgtgttggcgaagatgcgcctcggcatgtacgcccagctgcgctacggctcggcatggaaggacctgccggtgctggccgaagccgtgctggcgaacgacatcgacacgcgcttcgcgacgctggtcagcgacgacacgcacccgcacacgctggtggccgacgggcacctcgaccacatcgtgcgggtggccgtcgggctggggatcgacgcggtgaccgccatccagatggtcaccatcaactgcgctcagtgcttccagatggaccacgacctgggctccatcgcgccgggcaagtgcgccgacatcgtgttcttggacgatctggaggacctgagggtcacccgcgtgctgatcgacggcgacgtggtggcggaagacggccgcgccctgttcgacctgccgccgttccaattccccgactgggttacgcactcgatgcacctgggtcgcgagctgacgcccgcatcgttcgaggtgcccgcacccgaaggcgttgccgacggaaccgtgcgggtgcgcgcgatcgagatcatccccgccaaggtcggcacgttcgaggcgcatgtggacctgccggtcgtggacgggcggcttgagtccgaccttcagcaggacgtgctgaagacgttcgtgttcgaacgccatcacgagacgggcacgtgcggctgcggcttcgtgaagggcttcggcatcaagcgcggcgcgatggcgtccaccgtggcgcacgacgcgcacaatttgctggtggtgggcacgaacgacgaggacatggccctggccgcgaacacgctggccgcctgcggcggcggcatggcggtggtcgccgacggggagatcctggggttggtggagcttcctatcgccggattgatggactcgctcgacgccgtaacgatgagcgagaaggtacatgctttggagggcgcatgggccgagatcggctgcaccatgccgtcgccgttcatgacaatggccctgatcccgctagcatgcctgcccgaactgcgcctgacgaaccgcggcctggttgactgcacgacgtttgagttcgttgatttggtggttgagtagcgatccgaaggacgtctgcgcctttcgcaactcggcgcaggcgtccgacgagcactactcggaatcagcgaatcaatccgcgttctcgataggaagcgacggcaaggatcggtcgccccttcgttagggagcgactccatcttatggaacgctgctcgatttcaacccggataccctgcttctacccgcgcgcccgcgagtggtacgaccgaccacgcctcggccgtaccacgacagctgcgcgcgacttcaacccgcgcgcccgcaagctgaacgatgacgtgtcagcgttcagcttgccagccaacccgaacagtttcaacccgcactcccatgcggggagtgacccgcgcgttctcgagcacggagtacaccgcggtgccatttcaccccgcactccccatgcgggaagtgatctacatccgtttcaacgaatcgcgtatattcctcatttcaacccgcactccccatgcgggaagtgaccccgtgaatgcataggacgccatggcatcgtagatttcaacccgcactccccatgcggggagtaactggccgaggccaacgacaaggccgtcaacgcctacctgatttcaacccgcactccccatgcggggagtgaccgcctacatgggttcgcgccttttccccgacatatttcaacccgcactccccgtgcggggagtgaccaggtactcgacgttctgggtgatcgcggtgggatttcaacccgcactccccatgcggggagtgacgtttgcagccttgacgctttcgttcacgtcagtgccatttcaacccgcactccccatgcggggagtgactaacggcatcacggtcggcacgccggtgcagcttttcatttcaacccgcactccccatgcggggagtgacttgagccagccgagaccctgcgagaggctgccaatttcaacccgcactccccatgcggggagtgacgtcaggcttgcttcgagtcaacggaaacagctgatttcaacccgcactccccatgcggggagtgactcgtctggcgacagaccgagttggctttgcgcatatttcaacccgcactccccatgcggggagtgaccccggtgatgtcgtaatggatccacaccgtcctcatttcaacccgcactccccatgcggggagtgactaacggcatcacggtcggcacgccggtgcagcttttcatttcaacccgcactccccatgcggggagtgacttgagccagccgagaccctgcgagaggctgccaatttcaacccgcactccccatgcggggagtgacggttatcaaaatgcgtctgttcaagttcgtttaatttcaacccgcactccccatgcggggagtgaccagctcgacgaacgcgacgagcgaaaagaggctatttcaacccgcactccccatgcggggagtgactcgtgggtgcggttgtagccgtccagcacgtcggcaaatttcaacccgcactccccatgcggggagtgacacggcctcagctcctcggtactgtaaacatagtaatttcaacccgcactccccatgcggggagtgacgcggcgctgacttttctttgggtcgtcagcccatttcaacccgcactccccatgcggggagtgaccaatttcggaacaaaaaaatcgtatagtagcatatttcaacccgcactccccatgcggggagtgacgcttcgacctgtccgagttcaccaaggccgacatatttcaacccgcactccccatgcggggagtgacggggccgacagggccgaccgggccgacagggcctatttcaacccgcactccccatgcggggagtgacgctgaatggcgttcgccggcgtattcgtcggcttatttcaacccgcactccccatgcggggagtgacgcgtgcgccatcgacctgcgaaaagacatcaactgatttcaacccgcactccccatgcggggagtgaccgtccagcttgcttccgccgtcgcgcacggtttcatttcaacccgcactccccatgcggggagtgacggtgagttcgccgttggcgcgcttgatcgattcattatttcaacccgcactccccatgcggggagtgactcggcctgatcccctacgttgtcgtagcggatcatttcaacccgcactccccatgcggggagtgacggacgtcaacggcaccggcgcgaagcccgtatacgtatttcaacccgcactccccatgcggggagtgaccggcgaccgtcaactacgtccaagtactcgccatatttcaacccgcactccccatgcggggagtgactcgagcgcgcgctcaagctcgatccgggcaacgtatttcaacccgcactccccatgcggggagtgaccatcgtcaccaacgacgggtacacaggcgagctcatttcaacccgcactccccatgcggggagtgacccgatgaggccggtcgtgtcggtaacgaactcatttcaacccgcactccccatgcggggagtgacggttatcaaaatgcgtctgttcaagttcgtttaatttcaacccgcactccccatgcggggagtgactcgtgggtgcggttgtagccgtccagcacgtcggcaaatttcaacccgcactccccatgcggggagtgacacggcctcagctcctcggtactgtaaacatagtaatttcaacccgcactccccatgcggggagtgacatagtatttgcggcgcatataacacactaagtaatttcaacccgcactccccatgcggggagtgacgctctcgcgcgatgattatggcgtgactatgtgatttcaacccgcactccccatgcggggagtgacttatggacatgttccacataccagatagataccgatttcaacccgcactccccatgcggggagtgacccgagtacgcgcgcatcgacggcttttacaaggtatttcaacccgcactccccatgcggggagtgacgcggcgaacggcgattacgagactgcgatacaggatttcaacccgcactccccatgcggggagtgaccgcaatattatgcgcaaaatttactgcctcgatcaacatatagcgccaatagacaaacaaggtacacgcaacaagcgcgtcaggcatctttatgtcacactatttggtgcgaacctcacgtatgtcatatgcgagcttcgtgctcgcaccatggtcctacaatgccaagaacccttcagcttcgtacgttggcttcgcacctacatgctcaatcttcgtctcatatttgcttccaagactgtagaatcgcaaactatctttctccggatcgatcagctcgacgagctcgctcttgatacgaaccatcgtcgcagcatcggcaacgcattcgaacactgagttctggacacgctgaccgtaattgacgcaatgtcgcgccacttttcgcaagcgacgtcggcctgccggatcctcggtattcacgtcgtaggtaatcactgtcagcatgccaaccatctcacttccatagaaacggcgggtagccgtctagatcgccgcgcaagcaacgagcgagcaacagcgcctgcacatgcggcacaagcccccggggaatcttctccttcaaaaagggatgggtgatcgtctccttctttcgctcttgccaagcgccgaacaaagcccgtctcccttcatcgcccaaccgaacctcacccgattcccgcttctcaaaatccttcgaactcaccacccggttgttcaaggcggaaagcacgaaccgatcgacgaacaccggccgcagctcctccattaagtccaaagcaagcgagcgtcgaccaggcctatccgcatgcatgaaacccacgaacggatcaagcccaacaccctcaagcgcagacgcgcaatcgaaagccagaaccgtgtagaacagagacagcatggcgttcatcgcatcggtcggaggacgccgcgctctacctgtaaaacgaaacgtctccttatctcgcaacaccagctcatcgaacacgccgaaatactctgcagccgcgtcgccctcaatccctcgcaaggaatccatcgtttcgcactcagccgcactgcgaagcgaaccgtcaagcctcatgctggctgccttcaccgatcccgtatcaatacgcaacccatggtcgcgcaccgcccgttcgagcacccaacgaccgttgtagagctttcccacaatgaaattccgagcgatagcaaggctcttttcggtttcttcagaccatgcatactgcgtttttcgcagcagcacgtttccgcgttgctcgccgtatgcgcctgcaaggaaacgacccttccgatcgaagaaagacaggccgacgccccgttcgacgcaggcgcccataagggcaggacttgcacctcggtacgagaagcagaggataccctcaagcgtatggagcggcactcgtccaagctctgcgccatcgcgacgtacaaccacgttctccccatcgagcatgagatacgcgtcttccgtgaacacgtaaagcgtgttgagcaaatgtctcatagctcctcctcgaaaagccttttggccacatactccccgaccgtcgcccgattgatggcgcgcggcaggcagaggtcattcaacgagcacgaccgacaggccgaaaagggcttcacccgtggagtatgacggcgtcgatacaaagcatgcatctcctccaccatcgagccaaccaaagcgcacaacgactcgtcgaactccaccttttcgcgcgaacgcgtttcgccgtagtaaaggaacccaatgggcacatccgccccaagcatctcctccaagcacaacgcctgtgcgcacaattgcagtcggtcggcatcgttcgccttgctcgaaccgcgcttgtactccaccggcacagcgcgccaaaggccatcctctcctgtgagagtatggccatgcgagttcttgcggaattcgacgacgtcgcacttccctgacaagccgagcgcacgcgaatgcaccgacaagccgcgaacgacgagggtatcacctcgccgttcgcgcagctcttcatcatgggcgcgtttgtgcatgagctcgccttgggctgtcaacacgttgtcggcccacgcttgctcgatatggatgagcgcccactgtcgtcgacagaacgcgaagtgctggataccagacagcgcgaggaactcgtcctcgtcgtacaccgctacaccatcctcagaaccgtgactccctcgggcacggcgccctcgtcaacggtgatctcctcgtagtcgtcgatggaacgcggagcctccacgccggctttcttctgggttgaaacagcgtcgaacagcttgtacgacggcgcattgccaagctcgctgtcatgcttgaacaccacgagcgcacgaaccgccatcttgccgcgcgcagccgagtgatcgtgctcgaacatgttgacgatagcatcccacagaagggcgaggtcgtcctccgagaatcccgtcgatttgcgcgccaagttcgccgaaacgtagccctccccgcgatagagcgcatagggaaccacgtacttgcgacccatctcggtgcccttcttctcggcatcggcttcggtggtgatggctacgcgcgtgatggtgacctcctgcggaatgataggatcgacgctgcgcgcgaacgtcagctgcaccggcccgcgcacctgcccgcagttgagcgcgcctttgacgaacgtggtcatcaccgcaccgaacgtgcgcacatcatagaatgtctcgcacatgaaatcgcgaatcttctcgtcgagcgcaggatcgtctttcttgagttttttgatggctttatcatcggttcccacgccgaactcgtcgagcgcccgtcggtcgctcgcattgagcggcacgccgtccttgatgtatatctcgaaaccccgctcgccttccttcaccgtctccacgtagttgcggatcttgcgcttcaagcacacgtcagtcacgatgccgaggctcgtctcgggatcgatgcgcggcatgttgccggcatcgggatcgccgttggggttaccgttctccacatcgaagtacacgacgaagtcgtaacggttcttgatcgtatcgctcatgatttaaccctcctgatcgtttttcttctcgtaacgtttctgcgtttgatggtagtatcccaggataaagccaccctgttccgacagcgaaagacgtttgggaaacccttggattccgttgcataactcctgtatctgcttttcgtagaacaccgcgagtccttttcggtcgcccgcgatcttattcagatggttctggccaagcttcatgatgaccgggaacaccacactcggcatcgcgttcgccgaatcgaagtaccggttcttgattgtagtttttatgcccggattggcctcttcctgcacgcgttccagcacggagaacaatcgtcccagcatatagggggtatctcttttcgtttcgtcgagtgacaccgtcaccgcctccttgtttagattcttgattagatacgctttaatgatcgccacacgtccgcgcgtcaccttgcgcgtgcggcggtcatcgtcgtcctgcgtcgctcgcactcgcaacagcacgttcgagtacagcgcttcgggatacggcgcatcggccaagatcgaacgcatgagagcgcctgcgagcaccgacgtagcggccgcttgcttggcattcgggttcgccgtctccgcaagcaggaaatacggcgagaggtatttcttctcgtacggcgcgcgggtgatatcgatacggtcgtaatgcttccgcagattgtccagcatagagccgaacatgccagacatgaagaaccttaccgacagccttgccgcattcggggcaagccctaacacgtggaatgtcgcatcgagctttgcgctttccacctgccgtcccgccgccaaggcacccatgatcgcgtcgagcttttcatcagggtcgtcttcgccctcagctcgttctccaaagttcgggttgatggcttgcgagaacaaggctgcacaatcttcatcatcgctatcggcccagtacacgatcgtcgtatcaccaaggcgaatatgatgattgcgatcagacagtagatagttcagggcagtcgtgtaagcgaacgtcacccgttcgcttactggggcattcaacccctgctcttcatcgtgcccgtacgactcaaacgcacgcgcgttaaagcccacgagcgatgcccccatcgactgcgcccccatcacgcctttgatggcaggatgcagtcgagcgataggagccttctcgccagtgaccaggcatgtcgttacctcttcgtctttgccggatcgttcgcagcgtcgatcccatgccgcgcagatgtcgcgatcggcgagggcttcgcaaccctgaacgaagaacacgagattgcctcccgcaagcagcccctcgccagcatccaccacacgagggtgctccgacgcctcctccacattccacgtttcaaagtaagaccggatcgcggttgcaaccggcgaatcgacatcagcgagcagctcgagatgcttccgccgtgcatcgtcgaagcaccgacgggcgcgctctggtttgcctttggcatcgagacctagcagataggtcgcgttatcgcacaagagattggccgtcacgcccacagtgcgcttcgcttgctcgggcacctccctcgtccagccccgcttctcctcggcaggaatcacgttgaccaactcgccatcgggcgaaagctccagcatgaaagccacctggcgcgaacaccatcccggtcgcgcgatcctttcgggatgttctctagacagctgctcatagtagtcggcaagcgcttgcaggatcatcggaacacctcgcttcccgccacgtcgatcacgccattgcgcataacagctcgaaaaaacatcggcataatgttctgcggatcgacgtaatccatgtcgtaaagcattaagccgagatcgcgctcgccggaatctgcatagcacccctggggagcgtctccgtcacatgccttgaagtgagctgcgaactcacgagttccgaagtacggggttgagtagcattgccctcgatcaagcctccgccttatgatatccttgaatttgccggggttgtcttcgggcttcgctcggtcggtcaattcgaaatgcgcttctatcacatagcgcacgtcggtgaggatcagtgaggctcgttgctggatatcctctttcgtgtttatgtagggcaactcgcctccgtgcgtcatgacgcttcttatggagctggcgagcgctttcgatttaacctcgttgcgccgcacgttggtgaagcgaatgggattgagcacgtgtattcgatcgatcgtatatcgcatacccggatgccagtatatcgattcgatcagaccacgagccgccgaaggcgtgatcacatcgtacgaaacgcgttccaccgacagctccggcctcgtgaagagcgcccgctcgccccaaacctcgatttggattccatatgccatatgatacctcctttcatttttttcattcttataaaggtttaggttaaaatctactgcattcgttataccatcagaaattgcaaccgtcaatgtcaccatatgcttatatttgattttcaaggtgctttagttcacaatgtccacgtcattgcgttgcaatgggggttgaaacattctcataaacagttaagcggtaacggcacaggggcgctccaagcgcccctgtgccgttacaggaatatcccctttccttcttcgtttttcagatccaatccgcgttgatccgagtagcatgttccatcgaccagcacgaacaagtcctcggcaagagtctctatcttgccgctccgcagtaaagccttgatatccccatcgtaaacgccgacggcgtagcgcgagagcctgcgtatggtcgagcgattcgcgaaaccggttttcaccgcgaggatatcggattcgatttccggatcgggtatcaccaccgtgcgcgagccttcctcgatcatgcggaaatcgtcggccgcgcgcttgaagggtatgttgagggattttaggctgaacccttcgagatcgcgcagcactcccgatgcgtcgagcgctccttcgcgcacggcgtacagccttgcaaagtatgcgtcgatcgcctcgagagccccgatatcgcacgactcgcatgccgctccctccatctcgcttatgacgcttcgtgctatcgccactttctgcgcgacatcggaaggcagagcgtagtcgtcggcgggctcgaacacgtgcacgatgctttcctcggccgactgccggccttctcgattgcatcgcccagccgcttgcaccatgctgtccacaccagcgagcgcgcggtagaccacagggaaatcaacgtcgacgcccgcttctatcaggctcgtcgccacaacccggcaagtccggccctcgcgcagacgttgccggatctcgttcagcacgcgctcacgatgtacagggtgcatgagggttgtcagatggtacgagtcttccccgtcgagcagctcatgcagccgcctcgcctgcttgcggctgttcacgatgcaaagcgactggtcgcgatctgccaaacgtgctgcaagatcgtcatcaccgagcacgccgtcgaaacgatacgagacgcgtttaagctttttgaacaattccgacggcgcaggtgcgatctcgcgcacggcgaacccctttcgtccaagcatcccgttgaaggccggctgcgtcgccgtgcacagtaccaccgaacaaccgtagttcgccacgagctctataagcgcgcgcagacaaggaagcagctgcttggtgggaaccatctgcgcctcgtcaagcacgatcacgctgttcgcgatattgtgcagcttgcggcagcgcgatgtccgattagcgtagagcgactcgaagaactgtacgttcgtcgtcaccacgatgggcgcgtcccaattctcggacgctcggcgaagcgccttcttcgcgtcgcctgacttgtacgactccacctcttcgtcgaaatcgaaatcgaagttcgcgtgatgctccaaaacgctgcgctctcccagcacatcgcgaaagacgcgggcgttctgctcgatgatcgacgtatagggcacggcgtatactacgcgacgtgcatcgcgcttaaccgcatgctcgagcgcgaatagcagcgacgcgtacgtttttccacctccggtgggaaccgttagcgagaagaaaccggggtggttcgaagcagctctgatgcatgcatccagcacctggcagcgcgtttcgttgagcgcgctcgtcggcgggtagaagcgagctacctcttctttcaagcaacccaggagatcgacaagggattgctccgaaagaggatcgcgtccttcgccctgcatgaatctctcggtgcaaaggaagtccgcatccaccaaacaggagaataccatgcgcgtcaaaaacgaaagcgaataggctccgtcctcccgatcgcgagaaacaggcagaacggaagggcctttcggaacgttaagctcgacttcgcgcgcataggcggcgcaatcggggatgctaccgtgttgtgcccgcagcagtcgaccgcgcagagtcggacagtcttcgacatctgccgtagtgcccccgtcgggaagccctgcatgatggccggcaacgcagtaagcgagcaatttcaaacccaactgatcaagcagagcagcccccgccgtggagtgatcgactttatgcccgtcgcataggatgcggttctggaattccgtggaatacttgccgatgtcgtgcgccattcctgcggcataggcccacgattcggccccgaacggccgcgcgaactcggccgccatctcggccacctcccgcaggtggtcggccacttcttcgatgcgcccgtcttcggcaacatgggatacgtgcatgaatacctcccgtcagttagcgcaatcgcgcgccgttcagctataaaatataactcatcttgacatgcataagctctctaatcatttttatagctctcgatgatactctggaaactgttttcgcatgtcccccaagcgggacttgcagaaaagcgttttcgtttatcattgaaagaatgtctaatccaaaaaacaggtgcatgaagcatgcccgaagaacaaccgggttgtacaatactccccatgtccctcgctaccgacatacgctcctaccaacccttcaaccagcaggaggcatccgatcgcgaggttatcctccggcagttggaaaccgacccgcacgtgttcgaccgcgactcgctcgcgcatatgacgtgctcgatctggacggtcgatccgaccgtcacccagacgctcacggtgttccacaacacgtacggatcgtggagctggatcggcgggcacgccgacggagagcgtgacctggagcgggtggcgctgcgcgaattggaggaggagaccggagtcgccgacgcgcgcatcgtgccatgcgggccggggaacatcttctcgctcgaggtgctcaccgtggacgggcacgagaaacgcgggcgctacgtcagctcgcatgtacacctcaacgtgacgtatctggccgtcgcgtcgcccgacgacccgctgcgcgtcaagcccgacgagaacagcggcgtgcgctggatggacttcgacgaggcgctggccgcatcgacggaaccgtggatgcgcgaccggatctaccgcaagctcgtcgacaagctggccgcggtcgacctcgaaatgagacgttagccccgtcccttcgcctcatcccaaagctcgcggggaagatagtacgattcgaagtcctgcatgaggccgtcgggggttgcttcggcgccgtggatggtgccctcgtggacgaagcccgccttctcgatcacgcggcgcgaacgatcgttgaacgtgtagtgcgtgcacgtgatcaggccaagccccagctcctcgaagccgtagcgcagcatctcgtccgccgcctcggtcatgcagccccgcccccatgccgtgcgcgcgagcgcatagcccagcatgaggcagtcgacgttgcgccgctgcggatcgcggatgaggccgatcgacccgatgcacggccccgtggctcccgtccccgcgcccgtcttctcgaagatgccgaacacatgaggctcgctcgcgatcacctccacgaacatgcgcgagtcctcgcgcgtgcggtgcggggcccatccggcatcgggcccgacggcggggtcgctgcagtaggcgtacacgtcgtcgatatcgtcggaaacgaacgggcgcagcacgaggcgctcggtctcgagcgcagggcactcccccgacgtcaccgccagaatcgccggcggacaaccgggatgccgcgcctcgccggcccgaacgcaagccgcgaaccgcacctcgtcgagcacccgcacgcccgcctcgcgcaaggcgcgcgccgccacgccgtaaccgggcacgagctcgccggcgaacgcgccgtcgtacacgaggccgcatccgcacgaagggctcttcgccttgagcacggccagcttgcacccctgctcctgcgccagctccaccgtcttggcggctccggccaaaaacgcgtccgtgacgtcgaccccgtccgcgtccgtcacgcgcagcgcgcgctcggcggcggcgatctcgcagggggcatgcggcacaggcagcccgcccagcacctcggggcacacgggaaccatctcgcaagcgtcgtgcagcttcagcacgtcctcgcagggacgcgacttcccatcgtagcggcacggctcccccagcaggcatgcgctcacggctatcggcatcgctcgtcctcgtttcgtcgaaaaaacccagtatagcaaagcccgcgactccgctgcgttagcgcgtgcgcgcgaacactagaaccgtggcgacggccgcgaacatggccagcgccgcaagcacgcccacgagcgtcgtcgcgcccacgagcgcgcccatcatcccgctaagaaccgccgatcccgtgtagccgatgagattgatggtcgacaccaccgtcgccgtgctgcgcatgtcggcccgcgcgaacaagaggcgcaggctgcccgacaggcacatgcccgtggacaggccgaacaacgccaccagcacgaggaaagcgcccaaagccccggccgccatcgctacgcacatcgcgcacgtgaacacgaggagcgccgccatcgaaacacgcaacgacacgcccgacggcatgcgcgcctcaagcggcgcccccaacgcgctgggcgccatcgacagcgcgaggatagccgatgccatgaacgggtcgctcgaaccgaagcattccgccgccaccggcgagctgaacgattggaagaacgtgcccacgccccacgacgcgacgtaggcgcacgcggcgatgggcagcacaccacgcagcttcgcatccacgccgatcaccggcttgcaggcggttcgcagcggcacgcggctgacgaccgtttcgggagccgcgggaatgaggatcgcgcccagcgccagcaacgcgatcatgatccaatagatcagcgcgtgctgttgggtgaccaaggacaagaaccccacggccagcgagcccgccatcacgcccagcagcgcgccgcaaccggccaccgccagcccgaacccctcgtagcgccccacggcggaatcgacgaccagcgccgaaacggcgctcatggccaagccgcacgacacgccctgcacggctcgcgcaaccagcacgatcgtcggatcggccgctctcaagaacaggaaacaaccgagcatggcaagcagcagcgacgccgccgccaaggggcgccgtcccgccgcatcggacagcgatcccgacaagaacagcgtcagcacgacgccgaacaggtacatgagcatggtggcggagatgtcggcgtcggtgagcccgatcgcccctttgtactcggagtacaaagggataggcacagccgaagcggcgaacacggtgacgaaggcgaacgtggcgatgacgaggcctcgcaccccttgccgaggctgcgaggattccgacgcgtcgactgcatgcgcgagcatggcaccatccgttcgttcaccgcgaattacacccgcgctcttccctgcgaggagcgattgcggacagcatagcattccgaacggacgcagggaacacccgcgttcgcccaacgcggcgcgcacggttctggatttctggtaccattgtacggatgttctgcaatgctttcgagggagggccgccgcaccgcatgctatccgaagacgacatcagcaggcactgccatgcgcgcacgttgcaacgggcacggtccatcgcagcctccgaccgcaacatcctcacaaagcaggtccgctacaaccctcccgagaccacgctgtccgcgttcgttgccagcagcagcggctggaacgaccgttaccgcacctccgtcaccttcgacgaggacgaaggcgacctggtcgactacgcctgcacctgccccgcctaccgcgagtatgacggcatgtgcaagcactgcgtggctctggcgttgacgtatctggacgcgcctgagaagttcatgggctaccgagcccatcgcgcgccgaccacgtcttcatgcctgctcgagctcatggagcgcagcaaagccgctgcagaagctgaggaacagggcggcatcgatctggaagcaaccgtcgtgtacggctatcggtcgtggtcggcgcacttcaaggtcgtcggcccccagggctcctacgtcatgaagagcatctcggacttcgtcggccgcatgcggcgcggcgagcggttctcctacggcaagaagctcgcgttcacgcacgtcccggcgatgctcgccgagtcggcgcgccccatcgcccggttcctcgaccgcgccgtggcgctgcgcgagcaggccaccggcagcgcgttttggcgctaccgcggacgcgacgagatcggacgcgacctcgacctgtcggactacgagctcatcgagctgttggatctgctggacggccgccccttcaccgtcgaaggcaccgactacggaacgcgctccctcacccgcgcgcatgtcgtcagcgccgaccccgatgtcgaggtctcggtgcggcgcaccgacgacggcggctacgccatcgaagccgacgagctgcctttcgtggcgcagggcgaccgcatgtacctgtggcagggcgagacgttcttccgctgctcggccgacttcgcgcgcacggcgggcttcctgcgcaccgtgtacgagaacgacgatgcccgcctgttcgtcagcctcgccgacatgcccctgttctgcgccaccgtgctgcccgccatcgagaagcgcctccatgtggaaacgccgaccgagatcgggctgttccgccccgtgccgtgcaagctggagttctacttcgacaagaccgaccgcgacgtcacctgcgacgcgcaagccgtgtacggcgaacgccgctatccgctgctcgactcccccgctcgcgacgaggcgggccccctgcgcgacgagaagctggagggtcgcgcgaggcggctggtcaagcagtatttcgacacattagaagctcccccatccatcatgctgagcgacgagacggcggtggccgacctcgtgttcggcggccttgtccagttccaggcgctgggccaggcgttcaccacgcccgcgttcgaccggctgctcgtagacaagaagccacgcatctcggtgggcatctcgctggcgggcaacctcatcaacctggccgtgtccaccgacgacctgcccccggccgaggtggcggcgctgctggcgagctaccggcggcgcaagcgcttccaccgtctgaagagcggtgcgtacctcgatctgacggagtacgacctcgctcagctcgaccaccttgcggaggacttcggcttcacgcccaaacagctggccgcaggcgcggtggagcttcccgcctaccacgcgttctacctcgacgagcagttcaagggcgcagagcgcaaccgctcgttcatgcgctacctggaaagcttccgggcatcggccggcgagccgtgcccggtgcccgaccagctggccgccacgctgcgcccctaccaggcggaagggctgcgctggatgagcgcgttggccgaccgcgatctcggcggcatcctggccgacgagatgggcctgggcaagtcggtgcagctcatcgcgtttctgctggcacgccagagcgaggcgcgcgccgttgggcccagcctcatcgtgtgccccgcctccctcgtgtacaactggatggccgagttcgagcgcttcgccccgaccctagacgtgcgcgccgcggtgggcgccaagcgcgagcgcatgcgcatccgcgccgaggcgtgcgagagagacgcacgcgaaagcgagcttgcccgcgacgggcgctgctgcgacgtgctgatcacctcctacgacctgctgcgcatcgacgcggaggacttcgcccggcgcgaattctactgctgcgcgctcgacgaggcgcagtacgtgaagaaccacgccaccaagacggcgcgcgccgcgaagcgcgtgcgggcgcgccaccgcttcgcgctgaccggaacgccgatggagaaccgtctgagcgagctgtggagcatcttcgacttcctcatgcccgggcttctgggatcctacatgcgcttccgcgagcacttcgagctggacatcaccggaggcgacgaggacgccgcccgccgtctgcgctccctcgtggcaccgttcatgctgcgccgcttgaaggccgacgtgctgcaagacttgcccgacaagctggaatcggtggtgtacgtccccatggaggccgagcagcagcgcctgtacgccgcccacgagcagcagctgcgcgacgcgctgaccctgcagaagaacaaccgcaacaacaagcagttccacgagcgcaaagtggaggtgctcgccgagctgacgaagctgcgccagctgtgctgcgacccgcgccttctgtacgagaactacgccgggcacgcggcaaagctggacgccatcgcagagatcgtggaatcggccatggacgccggcgagaagacgcttgtgttctcccagttcacaagcttcctttcgctgatcgccgaagtgctggacgcgcacggcgtgccctacttcaccatcacgggaaccacgccgaagaagcgccggctcgatctggtgaacgcgttcaacgacgacgacacgcccgtgttcctcgtgtcgctcaaagcgggtggcaccgggctcaacctcaccggcgcgtcggtggtggtgcacgccgacccctggtggaacgccgctgcgcagaaccaggccaccgaccgcgcgcaccgcatcggccagacgcaggtggtgagcgtccacaaggtcatcgcgaaggacaccgtcgaagagcgcatcctgcatttgcaggatgcgaagaccgacctcgccgaccaggtgatcggcgccggcggcgtgtcgctggcgagcctgagccaggaggagctgctcgatttgctggacggatgaggcgcggcttagaacttgccgaagcgttcgtagcgggctcgcagcagctcgtcggtcggcgttgcgcatagctcgtcaagcgtggcgcacacgtaggagcgcacgccctcggccgcctgctcggggttctcatgcgcagggcccgctccttcggacagcacggcgtccacgatacccatctcgcaggcttcggccgcgctcatcttcatgacggcggccgcctcggcggcgcgcgtgcgatccttccacaggatggacgcgaagccctccggcgacagcaccgagtacaccgcgtgctcctgcatggccacgcgatcggccagcgccagcgccagcgcgccgcccgagccgccctcgcccaacagcacgctcaccacgggcacgcgcaggcccgcgagcgccagcaggttgtcggcgatggcgttgccctgcccgcgctcctcggcctccatgccgcagaacgcgccttgcgtgtccacgaggcacaccacggggcggccgaacttctcggcctgacgcatgaggcgcaaagatttgcggtagccctccggctgcgggcagccgaagttgcgcgcgatgcgctctttgaggtcgcgtcctttctcttgcgcgatcaccgtcaccgcgcgacccccgatccagccgaggccgcacaccacggcgccgtcgtcgccgaacatgcgatcgccgtgcagctcgatgaacccgtccacgaacgagtcgatgtaggcgagcgccgtgggacgatgcacgttgcgcgccaactgaacgctctcccatgcgcggttcgacgtgggcgcagtggcctcgcgcgccgcagcggacgcgtcctccaaagacacgccggcctccgcatcgaaaccgcccgtgctgagcgccttctccaaacgcttgcgcatggaggagccgcggcggtcgaagcgctcggtgacggccgccatgcgcccgcgcagcttggcgcgcgccgagtccacccctccggcgaaaggcaagccgccgcccacggtcaaatcgccgtacgtcaccgtgttgtacgtatcggtgccgctggccaggttctcgcgcaccgcctcgtagctgacgaggatatcgcgatcgcccggctcgtgctcctgctcgccgcgcacagccgatgccgtggcaaggtgcaacgccagcaagtgagccagcacgctgcgcagctcgccgcgctccacgatggcgtcgatcagcccgtgatccagcgcgaactcggccgtctggaagccttcgggcagctcctgcttgatggtgtccttgatgacgcgctggcccgcgaagccgatcagcgcgcgcggctcggccaggatcacgtcgccctgcatggcgaacgacgcggtcacgccgcccgtcgtgggatcggtgagcaccgagatgtaggggagcttcgccgcagcatggcgctccagcgcgcacgacaccttcgccatctgcatgagtgacacgagaccctcctgcatgcgcgcgccgcccgacgcggtgaacaccaccacgggcagacgctcgtcggtcgcgcgctccacgagccgcgccaccttctcgcccacgaccgagcccatcgagcccatgaagaactgcgactccatgatgccgatggccacgcgcaagcccgcgatacgtccgacgccggtgcgcacgccctcctccagacccgtcttctcgcgctgagcctcgagcttgcccaggtagccggggaactcgagcgggtcggtttcgggaaccgtgcggttccattccacgaagctgtccgcatccagcaagtcgtcgatgcgctcgctcgacgacatgcgcaggtaaccgccgcaagcggggcacacgtaatggccggcggccaggctggggccgtcgaacttgaggccgcagtgcgggcacgcgcgccacgaatcgccgtcgatagcgggtttgtcggtagtgcacagcacccagcccagaagcggcgcgtcattgctgagcgggcggaacacccgcacgccgcgagccgccgtgcgagcgagaaagctgtccacctcggccagcggcagcgcctcgtcgcacagcagaaccaccgaagccccgcaggagtcgatggccgtcagcacggcatggccgttgcagaacagcgcgtcggagtacttctcgcccaggctcaccgcgctttgggcgagcttgatgtggctatcgccccgatgatcctgcgtgtacactgcgcaggcggcgaaacccgcatcgcccacggcctgcatcaggcgcttcgcggttttcgggcgcgccatgacgagcgcgacgggcttggagcccgcatcgatccccccggcgcctttcggcgtgcgcggggcggcggtggccaacgcccgcggcacggcggtgtagtcggccgcgtcggcagcatcgtgcgcgttcggcgctatgggaagcgaagcggcggcctcctcggccatgcgcgcaaggcggtaggccacgtcggccgattcgccgataggctcggccgccttgcgcggcttgccctggggcagcaccgttccgtcggatccgatggtgatgtagttctgcttggcactcttcatcgaacggcctctcgctcttttaagcttccgctttcgccagcacgtacttctgcgtcgccgacgcgcacaccgcgccgtcgacgctcgcctccacctctgcgacgcacagacgcgacgaggacttcacgatgcgccctttcagcgtgagcgtctcgcccggctccacctggcggcggaacttcgcgccgtcgatgccggtgaggaacccgatggagccctcggctccgcgctcgacgaggatgcagaacgatgccgcctgcgcgagcgcctccatgatgatgacgcccggcaaaacgggatgccccgggaaatgccccgcgaacagcgccagctccgggtcgacgtcgagctcggccgtcacctccacgcccggctcacacgcgacgatgcggctcacccagcagaacgggtcgcgatgcggcagcaccgcctcgacgacgtccttgccgcaagggtattcgatgtccatggttcggctcctcccaacctatgcgcgatacggcgaaacggccaagctcgcgttatggccgccgaatccgagcgagttcgacagcgccaccttctgaggatagcccgtcttcgcctcgatgacgacgctgaccgggcattccggatcggcctcggcgaagccggccgtgggcggcacgcagtcgttcatcacggacaaagccgtgacgatggcctcgatagcgcccgcggcgcccagcgtgtggcccgtcgtgcccttcaccgacgtcaccgggatccggcttcccgcctcttcgccgcacagcgccagcagcgccttggactcggtggcgtcgttcgccggcgtgccggtgccgtgggcgttcagatgccccaggtcgaccggcgtgaagccgccctcctccagcgcctggcgcatcgcgcgcgccacgccctcgccgctgggctcgggagccgtcatatggtaggcgtcgcccgtggagccgaagcccgtgatctcggccagcaccgtggcgccgcgctcgagcgcatgctccagcgactccaacaccaccgcgcccgcgccctcgcccgccacgaatcccgcgcggcgcacgtcgaacggcagggaggcctgcgtcggatcctcggccttcgacagcgcgccgaggttcgagaacccggccaggcagatgggcgacacggactcttccgagccgccggccagcgccgcgtcgatgtagccgtggcggatgtcgcgcacggccgcgccgatggagtgcgcgccggtggcgcaggcggtgaccacgttcaggcattcgccgcgcagcccgtagcggatggagaggttgcccgccgcgatgttgccgatcatcgtggggatgaacagcgggctcacgcgcttcggacccttctcggccaaggtgaagaagccgctttgcagctcgtcgatgccgccgatgccggtgccgaacacgcacgcgatgcgcgcggtgtcctcggcctcgaggttcaggcccgactgcgccagcgcctcgtcggaagcgacgatggcgtactgcacgaagcgctcgaaccggcgcgcctccttcttcgtgatgccgtgctcggcagcgtcgaaatcgcgcacctcggcggcgatgtgcacgtcgtagtcggccgtgtcgaagcgcgtgaccgggccgatgcagcaggcgcggcccatgaccgcgtcccacagcgcctgcacgcccacgccggccggcgacaccgcgcccatgccggtgatgaccacgcggtgcgtgccgtcggggcggcgcgtgctcgccgcgttcgcaatgttctcgctcatagcgacatacctccgtcgatgcagacaacctgtccggtgatgtagcccgcgtcctcgctggccaagaagcgcacgagcttcgccacgtcctcgggctccccgaggcgcttggacgcgatgcgccccacgatggcctcgcgctgcttctcggacagcgcgtcagtcatgtcggtggcgatgaagcccggggccacggcgttggccgtgacgttgcgggccgccagctcgcgggcgatggacttcgtgagcccgatgacgccggccttcgaggccgcatagttcgcctggcccgcgttgcccgccacgcccacgacgctcgacatgttgacgatgcgtccgtagcgctgcttcatcatgcgctgcgccgcggccttgcagcagttgaacgtgcccttgaggttcacgtcgatcaccgcgtcgaagtcctcgtccttcatgcgcgccagcagcccgtcgcgcgtgatgccggcgttgttcaccagcacgtccacgcggccgaacgcttcctgggcggcgtcgacgagcgcagcggcctcggcggcgtccgccacgttggcggccaccgcgatggcgcgcacgccgcagtcggcctccagggctgcggcgaacgcccgcgcctcgtccagcccgcgctcgctcgagcagttcacgcacacgtcgaagcccgcgcgcgccagctcctcggccaccgcgcggccgatgccgcggttcgagccggtgacgaccgcgcttcgacgcggagtttcggtttcgttggtcatgggagtagaagctcctattcggaatcggttgcggaagcgacggccagacagccgtcgaagctcgcgcggtcctgcacgcaggcgcgcgtcgcggtcttgtcgatgcgtttcacgaggttcgccagaacgccgccgaagccgacttcgacgaacatgtccgcccctgcggcggtcaacgcagccacgctcgcatcgaagcgcacggggctcgtgaggtggcgcacgaggttctcgcgcgcgtcggcggcggacagcggcgcggcagtgacgttgcagacgagcgggatgcgcgcctccgagaactcgacgttatccaagtaagctgcgagccccgccgccgcatcggccatgagcgggctatggaacgcgcccgaggtggccaaacgcgacgagcgcttccccgcctcggcccatgccgcctcggcgcgctcgacggccgcgggcgcaccggcgatgacgatctgccccgggcagttgaagttcgcgggcaccagcacctcgccctcggcgcactgctcgcagagcgcagccacgccgtcctcgtcggccttcagcagcgcgctcatgacgccggggtgcgccgcagcggcctcggccataagctcggagcgcgctttcaccagcgcgaacgtcgcctcgtcgctcagcatgcccgacacggccagcgcgctcacctgccccagcgagaagcccagcaccgccgcaggctgcacgccgcgcgccatgagcgcgcgggcgatgcccaccgacagcacgcacagcgccggctgggcgttgcgcgtgtcgttgagctcgtcgggatcggcattgagcacgagatcggccacgtcgtaccccagcacgtcggacgcgcaggaaaacgttcccttcacctcgggaatatcgagcaggtccgcgcccatgccgggcttctgcgccccttgccccgagaacatgaagacgggcgcgcgcgcgaggaggggcggcaacgtccagtcgctcaaacagtcctcgcttcgctgcggaactcgcttggtggacgccgccgcccctcctcgctccacacccacaggcttccgaagccctttttcctcatccatcaagagccccctagatcgcacgcccgcgccgggcgctcagcgcagccagtgcttccaagtcgagaccgcccagagcctcggcttcttcgatcatccgagcgatagcctcggccgccgtggcgcgctcgtgcacgagcgcggccgactggcccgccatcatggtgccgttgtccacgtcgccctccacggcgcggcgcagggaacccacgtacatagcctccagctcgtcgccgttggcggcgacgtcgccttcgagcttgcgcacggtacgggcgaacttgttcttgaggcagcgcacgggatgcccgctgccgcggcctgtgacgatggtgtcggcgtccttggcggcgatcacgcgctctttgtacgcgtcggcgatggtgcactcgtccaccgtgaggaagcgggtgcccgcctgcacgccctcggcgcccagcgcgaaggcggcggccatgccgcgcccgtcggcgatgccgcctgcggcgatcacggggatggacacggcgtcgcatactgcggggatgagcgccatcgtggtcagctcgccgatatggccgccggcctcggtgccctcggccaccacggcgtcggctccgaggcgctccatgcgcgcggccagcgcgctggaggccaccacgggcaccaccttgatgccggcgtccttccacagctgcatgtagttcgcgggagaacccgcgcccgtcgtgatgacgtcaacacgcagcttcgccagaagctcggccgtctcgcccgcgttcggatccatgagcatgacgttcgcgccgatgggcttgtcggtaatcgagcgggcgatgcgcacctgctcctcgacccagtcgagcggcgcgccgccgcatgcgatgatgccgaggccgccggcctcgctcaccgcgccggccaggctcgcatccgcgatgcgcgccatcgcgccctgcacgacgggcacctcgatgcccagcagttccgttacccgcgtcttcatgctcatgctctctcttcctcgaacccacggccccgttcgggccccgtcatacaagcgggccccgtacggggcccgatcaacgcgcgttacagcgaatcgatgtgcgcgaccagctgacccaccgtctcgattccctcgggctcgccgaactcgacgtcgcacttctcctcgaggtcgcagatgagctcgaccatgtccagcgagtcgatgccgagcgactccagcgtggcctcctcggtgatcttctcggcctcgagatcgaggttctcgacgaggacttccttcacggtgtcgatggtagccatggtgcgttcctttcgcttcatgcaatttagtttgatagtcaaagtatttctccggaagtaatggtatggtgacgggactccgattgcaagagccgccatgcgccctccacgatttctgcgcccttcctcttattcccaccgccccgttccaggcgcacccaagacaggccccctcgacgcatccagccgaatagcccaaccgcgaacagggcgtgagcggtcatgcagtgcgacgagcaatcgctgcgtgtgcgaggagagctgcgtgaccgctcacgcctgccccgcaggtcgcaaactcctcacgcctgcgcgtcgaagaagcccttcaccttcttgagcgccccggcgaacacgcgctcctcctcctcggtaagatcggccaacgcctcgtcgatcatctgatggtggaacaggttgtgcgcgcgcagcacctgcctgcctttcttggtgagcgagaccagcaccttgcgacgatcgtcctcggcgcgcgtacgttccacgaagcccttgttcgccagtttgttcaccgccgtggtcagcgtagccaaggtcacgttcaggcgcgcggctatcacgttcatcggattgcgctcgtgcaggccgatagccacgatggtgtggacctcggttatggtgagcccgtgcgtcaggcggttgtccagcgactgctcctcgatgcgcaggatggagttgaacgtgccggacagcaggtcgtcgatttcctcgcgccgtctttgagaagcgctcgccgtctcgttcgaaccgtccacgatccccgcctcctcgtccgtcgtttcacatcggccgcatcataccgtatgtagttagatagtcaaagtttcgacatcgtcgggcggtgcgggggtgggcacgaaacgtcgcacgaaccggccctcgcccttgcttttgaggtagcggtacccgatgaccgagaacacaagcgctccgacgaagttcacgaacaggtctcccatggtatcgcgcagcccgatgtccagatatccgccgacacctagctcctgcccgttgacctcgacggattcgatacggtctatacgttgcggatgctgcgagcccgacggatcgagcagcgtgctggagatgccggtcatcaccgtgtccttctgcatgtcgagtccgaacatctcgtccatgccgaactcgaagaactcccacagcacgccgatggtcatggaaaagcagaacgccaccaccacgcagaagaacggcgacagagagaacgcgatgcgatccgagcggttaaggatggacacgagggcaaggcctatagcggcagccagaaacccgttgaacgtatgcagcagcgcatcccagaacgggaagatggtgtagaagtggagcagctcccccagtatctcggccgcgaagatgaacagcgcgatgaccacctcgagcgtctcggggatggagatgctgaagttcacctctatgaacgtggggacgagaaacagcacgagcgtgagcaggcacaggaagaacgcctcgtagttgtcgaaggcgagcgagccgaccgcgcatgccaacacgataaggcgcagcaccacgtataccgcaaacgaccctttgttcttgcgcatctcgcgacccatggccgcgaagacctcgcgcacccgtcccatgccggcgccctatcgctcgtcgcgggcaggacgaaagtccaagcgccgagcacgcggatcggcagagacgagcacgacggcgagccgctgcgccaggcgatacgacgcgcccgtgtcctgcccggtcagacgatgctgcacaggatcgagcgcgaagtactccgaaccaaggttcttgcacgggatcaaaccttcggccgtgttgtcgaggcgcacgtacgcgccgtacgtcgccacccccgacaccgtcgccgagaacgtctgccccacgaaccgctcgagatactcgatgagcttgacctcctgcgactcgcgcgcagccttctcggctatgcgctccatgtcggaggagtgctcggcgatccatggcagcgccgatttttcctggtcgaacttctccgggcgtccgccgatgagggccttgagcatacgatgcaccacaaggtcgggatagcgcctgatgggagacgtgaaatgcgtgtaggccccgctggccaggccgtagtgcgcagcgcagtcgggacggtacaccgcccgcttcatcgaccgcagcaggagcgtcgacacgagctcgccctcgggacgctccgcgctcgcctccagcacgcgctggacgacgtgcgcatcgcccgcgatgaagtcggcttgatcgatgtcgcggaaccacgcgaagtcctggaacacgggcacgagcgccgccaagctgtcggccgaaggctgctcgtggacgcggtacaggctggggaacttcgcatcgcgcaggtgcttggcgacggtctcgttcgcaaggatcatggcctcttcgatgagcgaggtcgcgtcggtcttgacgcgcaagtcgatacccgtcggactcccctcctcatcgagaaccacgcgcgcctcgaccgagtcgaagtcgaggccgcccgccctctcgcgggaggcgaaccgctgcttcgccaggcgcgacagcgcggcgaggcggtcggaaagcccgtcgcccggcgcgcaagcgccgtcgcgccgcacgagatccttcgactccgcgccttcggcgctccgctcaggatgacaacggtccagcagcgcctgcgcttcctcgtacgacaggcgcgcatgcgagcggatgagcgccggatacagatcgtaggccacgagccgcgcccgatcgtcgaggtagaggtcggccgtcatcgtacgacgcacttcgtcgggcttgagcgagcacagatcgcccgacaactcgtcgggcagcatgggaatcacacggtcgacgaggtacacgctggtcgcccgcctgcgcgcatcgaggtcgagcgaggaattccacggcacgtagtgcgccacgtcggcgatatgcacgcccaaccgccaacgcgccaccccgagcccgcgctcgtccaccacgcggatgccggttccaaccccgcaggtcgaaacgggctccaggctgaccgcatcgtcgaagtccctcgcatcggccggatcgatggtgaacgtgaaacgctccctcaagtcgcggtaccccgacgccaacgcgccgtcctcgtcgagcaccgcgcttcgcgcctccgaaagcgccccttcggagaacaccgtctccagcttgtgacgggcgatcaccacgtctacggccgcgtgctcgtcgtcggcgagcccgagcacctcctcgataacgccggtggccgccgtgttgcgcgaaggaaacgtcgtgatgcgcacgcgcacgagcgatccgtcttcgatgtcgggccggtcggcacgcatggtgaatatgtcataggggatgttcgcatcttcgggcacgaccacgccgaaaggttcggccacctcgtagcgccccacgagcgtgtcgtgcgcacggtcgacgacccgcagcacgcgcgccgccggcttctctcctgcgcgaagatctgctttgcgttcatgtggctgcttcttgcggccgctctgcacgggcagcggcgccacttccacgagatcgccgtcgaacgcacccgccatcttggattccggaacgaagaactcgccctccgccgtctgcacgaagccgaagccgcctccgcgcacgctcagcacgccccgcgggttgctacggggatgccggcgcgtatgggaacgcgtccgccccacggctagcccttcacgagggactgggcggtttcgagcgcgagagccttctggttatcctcgccctccgccaaacccaccatcacgtcgggggtgacgcccacgccttcgatgtcgtgtccgagcgggctcttgtagaacgcggcggtgtagcgcagcgctccgccgaaactcaaatcgcgcgtcacctgcaccgagcccttgcccaacgtcgtggatcccacgagcgtggcgcgctggttgtccttgagcgacgcggccagcacctcggcggaagcggaggtcttgccgttcacgagcaagaccagcggcttctccgtcacgtaggggcgcgaggtggtcttggacgtctcctcggccttcgtctggatcttcacaatggtgccgctcttcacgaacaggctggcgatatccaccgactgcgtgaggaaaccgccggggttgtcgcggatatcgagcacgaacgatgtggcgccttgcgactcgaggtcggcgaccgcgttcttcacgaggtctgccgcgttctgcgtgatctgcttgagcttgatgtagcccaccgtgtcggaaagctcggtctccacgttcttcaccgcgtagttcgagcacacgagcgtcgtagtgaactcctcgccgccctcgtcgtcgagcgagctggcgcgccgccacgtgatgacgacgttctcgccctcctcgcgcttgagcgcggaggtcacctcgttcgtggtccactcgtgtccgcggtcgccgtcgatggccaccacgaaatcgccgctgcgcacgtcggccatctgggcggccgaaccctcgaacacgtcggccgcgtaagcgcgccctttgtattcggagaacagcacgccgatgcccgccgactgctcggcgctgtcctgcatgagcgcggcgtagcgcgcaggatcgtaatagcgcagatacgcgtcttccgtcgtgtccgaaagcgcgttcagcacgttggtcgtggccatgttcaaatcgtaggagtccaagctgtcgttgtcgatgatgccctcgacctcctccacgcgcgccccgagggagtcgtaggtgtcgcccgacgtggtggatcccggattgcggtcgacgtccaccacaagcgacgtgaagccgagcgactcgagaagagaagcgtcgcctcgcgcagtaaagcccgcgacgaaagcgacgctcacgacgatgacgacgatgcaggccttgataaggcgcatgttgcgcgcccgcgctcgacgggcggacgccgcaacatgcgaagtgtcagtatgcttggccatggccgttcaaccggttacaccttgaggtagcggcgcatggcgaacgccgaacccagcaggccgatgagcaggcccgcgcccaccagcacggcgtagatgaacaggaaggtgttcaggctcaggtcgaagttgaggaacatgagcgcgctctgcagcttcggcagcgcgagcgtgcgcagaagctcaaggcagcccaccgccaaaagcgagccgatgatggcgtgcagcgcgccttccatgaggaagggcccgcggatgaagccgttcgacgcgcccacgaggcgcatgatggcgatttccttgcggcgcgccagaatggccaggcggatggtgttgttgatgaacaccatggcgatgaagatgagcagagccaccagcgcgatgccgatgtagcgcacgtagttcgtgagcgtgaacaggcggtcgaccgtctgctggccgtacttgagcgactgctcgggcgtgtcgtacccgatgatctgctggtaggtggagttgccgcggatcgcatcggccacctgctcgaccagctgcgggtcggacagctcgacgtcgatcgagcgcggcagcgggttctgcccgtccagcgtgtcgatgatgtcggacgtcgtggaggagcggaacttctcgagcgcctgctccttgttcgtgaagcccaccgatgccacgccgtcgagcccctcgatgaagttctcgaccgactggatatcggcatcggaggcatcgtcggacacgtaggccgtgatggacacctcgctctccaccgacgagacgagcttctcgacgacgaagccgccgacgaggaacacgccgatgatcagcagcgacaggaagatggtcacgatggatcccagcgccgtcgacaggttgcgcgtgaagcccttgagggactccttgataaagtagaagaaactagacatcgaaaccgtacaccccccgatcctggtcgcgggtgaggtgtccgcggtcgagcgcgatgacgcgtcggcgcatgttgtccaccatctcgcggtcgtgcgtcgccacgagcaccgtggtgcccgtgcggttgatgcgctcgagcagatccatgatgccgcgcgacgtctgcgggtcgaggttgccggtaggctcgtcacacaccagaagcggcgggcggttcacgatggcgcgcgcgatggacacgcgctgctgttcgccgccggacagctggtcggggcgcttgttgagcttgtcctgcagaccgacgaggcgcagcacctcgggtacctgcgtcttgatgacgtggcggctcttgccgattacctcgagcgcgaacgcgacgttctcgaacacggtcttgttcggcagcagcttgaagtcctggaacacgcagccgatgttgcggcgcaggtagggcacgcgccagttgcgcatggtggtcaggtcctcgtccgcgacgtagatgtggccctgcgagggcttcacctctcggatgagcatgcggatgaacgtggacttgccggagccggaatggcccacgaggaagatgaactcgcccgcgtagatctgcagggatatatcgttaagcgccggcttgttcggctgagccgggtacaccttcgtcacatggtcgaacgtgatgaccggcgtgcctgtttgctggggaatgtcatcgacttccagcaccggcagcgacgcagaaagctgcgacgtggtctgccgcgcgggcgccgcgtgggcgccgccgcgtcgtgcgggacgcgcgggaaccccttggcttatgtcgttcgtcacagagtgctccgttcgaatagtagggtactgagacgggttgattctagcagaagcactatcgggccatgaccttcttcacagcttcgacaatcgccctggaacccaggtcgaagtagtcgagcagctcctcgaattcgcccgatttgccgaactggtcgcgcatgcccacgaactcgaccggagccggattcgagcgcgcgagcgtctcggccacggccgacccgaggccgccgtacacgctgtgctcctcggcgaccacggcgcgccccgtcttccccaccgacgcgagaacggtgtcctcgtcgaggggcttcacgctgaacgcgtcgatgacctcgacctcgacgccctcggcggccagcatctgggcagccttcagcgcctgctccacctcgacgccgcaggcgacgatggtggcgtccgagccttcgcgcagcacgtaggcgcgcccgagctccagctccaccccgtcggcatagacggccggcaccgatgcgcggcccatgcgcacgtacacagggcctggcgtttcagcagccagtcggatggccgcgcgagccgcggcgtagtccgccggcacgagcacgcgcatgttcggaagcccgcgcatgagcgaaacgtcctcgagcatctgatggctgccgccgtcggggccgacggagatgccggcgtgcgtgggggcgatcttcacgtcgaggttgctgtagcacacggtgttgcggatctggtcgtaggcgcgacccgttccgaacacggcgaacgagccggtgtaggcgatatggccggtggccgcgaggccggcggccacatccaccatgttctgctcggcgatgccgcagttgaacagacggtcggcgaagcccgcgtcggccagcttcttcgtggtggtggagcccgtcagatcggcgtccacggccaccacaggcaaaccctcgttcgccagctcggccaacgtggcgccgtatgcggcgcgcgtggcacgtttgacctgggactgctcttcgttcgccagcttaaccacggctggactcctctccgctcggcgccgccagctcggccagcgcggtctccatctgctcggcgttcggcgccttgccgtgccaacccgcctggttctccatgaacgacacgcccttgcccttcaccgtgcgcgcgatcagcgcatggggcttgcccgcgcgatcggccttcgccgcagcgagcgcctccacgagcgcggccatgtcgtggccgtccacttcgcgcgcatcccagccgaaggcctggaacttcgctgcgagatcgcccggatcgcacacatcggccgtgtcgccgtcgatctgcaggcagttgcggtccacgacggccaccaggttgtcgaggttgcgatgcgccgcgaacatggcagcctcccatacctgcccttcctggcattcgccgtcgccgagcaaggcgaacacgctctgcggcttgccgtccagcttgagaccggccgcggcgcccgccgcgacggacaggccctggccgagcgagcccgtggacacctcgacgcccggcacgaggttcgagtcgggatggccctgcagtcgcgtgcccagcttgcgcagcgtgagcagctcctcgcgggggaagtagcccgcctgggcgagcacggcgtacaaagccggagccgcatggcccttcgccaggatgaagcggtcgcgctcttcccaatcgggtcgctcgggatcatgatcgagcactccgccgaagtacagcgccgcaaggatgtcggcgcacgacagcgacccgccgggatgcccgctgcccgcctccgcgatcatgcgcacgatgtcggagcgcatctcgttcgcccgccgttcaagttcggtcatgcctgttcctttctagaactcaacaatgtaaacaacaggttggctgtggtggtgcaggttgccttgaaggttccgcgcggctgagctaagcggcctgatgggccgtgtgcgaagccgcgcgggttctgaaaggcaagatgcgccgccacagccggccgtcatccagcaaccgtcattgagatactcgccaacggtggtagcctattacgaactcatccaactccccatccagcacggcgtcgacgttgccggtctcgatgccgctgcgcacgtccttcaccatctggtaggggtacagcacgtagttgcggatctggctgccgaaggtgttgtccatgcggtcgccgcgcagctcggccagctcctcttggcgcttctgctcctcgcgctcgtagagcttcgccttgagcacgcggaacgccgcttccttgttctgcagctgggacttctcgttctggcacgtcaccacgatgttcgtggggatgtgcgtaaggcgcacggccgagtcggtggtgttgacgcactggccgccggggccgctggagcggtacacgtccacgcgcacgtcggcggggttgagatccacctcgatgtcgtcgggcagcaccggcagcacctccacgcccgcgaacgtggtgtgacggcgcttcttgtcgtcggtggggctgatgcgcacgaggcggtgcacgccgctctcgcttttcagcatgccgaaggcgttgcgtccttcgatctggatggtggccttgtccagcccgatgccctcgcccgggaccacgtcgagcacggtgaccttccagtccttcttctcggcgtagcgcacgtacatgcggtagagcatgtcggtccagtcctgagcctcgaggccgccggagccggggttcaccgtcaggatggcgtcgccgccgtcgaagcgctccgagaaccacgagctgatctcgagcgcgtccagcagctcgtcgagcttgtcgagagccgcggaggcctcctcggcgaacagctcgtcctccgatgccaagtcgaacgcggcgcgcgcatcgtccaacaacgctgcggcctcgtcgtactctgcgatggtgtcgcgcagcacgctggcctgcttcgacacgctctgggcatgcgaggcgtcgtcccagaagccgggctgcgcgatctcctcgtcgagcttcgccagctccgccgcgcgctcgtcgatgtgcaggtagccgtgcgccgcctcgacgcgctgggctaccttctccaagtctttttcgtctctatcagccatgattccttattgatctcgtccgtgacacttcttgtacttgaggcccgagccgcaggggcacggctcgttgcgcccgacgttggcgaagggatcgtccttgtccttcgtgtacgtctggggcttcgccgccgcgggcttgggcggagccgccggggcgccgctcggcgacgcggccgcctgcttgcgcgcggcgcccacgcccgtctgctcgagagcctgctcgggagacgagtagctcacctttccgtcgagcgggctcttgtcctccgccaacgccggctgctcctgcttcacagccacctggagccgcaacagcgtgcgcagataatcctcgtacatgcccgcagtcaggttctggaacgcgttgtacgcctcgttcttgtactccaccagcgggtcgcgctggccgaacgcgcgcaggccgataccggccttgagataatccatctcctggaggtgcgccatccagcgcgtgtcgatcatgcgcagcatgacctggccctccagcatcttcatcaccggctcgcccagctgctcggacttgctcgcgaacacgtcctccaagtacgcttccaacgcttcggacagcacggcggggtcgtcgtcgtggtcgacctcggccacgctgaagtcgtcgcgacccgtcatgttggcggcccacagctccacggccttggcatcccagtcgtcgctgggcaccttggccgggcagttctccgcgacgacggcttccaccgcgtcgccgatgatctcggggatgcgctcgtccatgtctttgccgtcgaggatggcgttgcgctcactgtagatggccacgcgctgcaggttcatgacgtcgtcgtactcgaggacgttcttacgggcggcgaagtgcatgctctccacctggcgctgggcgccttcgatggccttcgacaccatgccggcctggatgggcatgtcctcgggcatgtcggtcttctccatcatgcgggcgatggagtccatgcggttgccgccgaacaggcgcatgaggtcgtcttcgagcgacaggtagaactgcgtcacgccggggtcgccctgacggccggcacggccgcgcagctgattgtcgatacggcgcgactcgtggcgctcggtgccgatgacggtgaggccgccggccgcgatgacctggtcgtgctcctcggcgcacacgcgcttcgcctcggccagcgcgtccgcgcgctgctcgtcggtgggaagggccgggttcggctcgccgtcctcggtcaaaggttcggcgtccggatcgagcccgcgctcgcgcagcacgtcgtcggccagcacgtcggggttgccgcccaacaggatgtcggtgcctcggccggccatgttcgtggcgatggtcacggcgcccacgcggcccgcctgcgcgatgatgtgtgcctcgcgctcgtggttcttcgcgttcaaggtctcgtgcttgatgccgcgcttgtccagcaggcgcgacaacttctcggagctctcgatggacacggtgccgatgaggcagggctggcccgccttgttgcgctcggccacgtcgtcggccacggcgttgaacttcgcctccaccgtgcggtagatgaggtcgtcctcgtcctttcgggcgactgggcggttcggcgggatggccacgaccggcagcttgtagatctcgcggaactcggcgtcctcggtcatggccgtgccggtcatgccggagagcttctcgtacaggcggaagtagttctgcagcgtgatggtggccagcgtctggttctcctcgcgcacgagcacgcgctctttcgcctcgagcgcctggtgcaggccctcggagtagcggcggccttccatgatgcggccggtgaactcgtcgacgatcttcacctcgccgttcaccacgacgtagtccacgtcgcggtggaacaggaactgggccttgagcgcctgctgcaagtggttcggcagctggccggacgggtcggcgtagatgtcgtcgatgccgagcatggcctcgatcttctccaggccgctctcggtggcgttgatggtcttcttcgcctcgtccatgtcgaagtcggcctcgggcacgaggccgaccatgacgcgcgcgaacttattgtacgtctcggccgcctgcgtgcccgctcccgagatgatgagcggcgtgcgggcttcgtcgatgaggatggagtccacctcgtcgacgatggcgaagtggtggccgcgctgcacgcgggcctctgcgcgcgtcaccatgttgtcgcgcaggtagtcgaagccgaactcgctgttcgtgccgtaagtgacatccgccttgtaggcgggtatcttcttgtcggggcgcatgccgttctggatgaggcccacctccatgccgaggaagcggtacacctgccccatccactcgctgtcgcgacgggccaggtagtcgttgacggtgaccacgtgcacgttgttgccgggcagggcgttcaggtagccggccagcgtggagacgagcgtcttgccctcgccggtcttcatctcggcgatctggccgtcgttcaaagccatgccgccgatgagctgcacgtcgaagtgacgcagccccagcgtgcgcaccgaggcctcgcgcacggcggcgaacgcttcgggcagaaggctcttgagatcctctccgttctgggcgcgttcgcggaacgcggcggtgagcgcgcgaagctcctggtcagagcgcgcctgcatctcggattcgaggccgttgatcttggccgcggtggcttcgtagtgcttgagctgcttgccctcgccaagcgtcaggagcttggaaagaaatcctgccatgtatgcgccatccttttcgtggcttgcagcgcggcgatgcgcgcctgttcacttgaatacagcacttgctactctagcatatcgcgcctgacctcaaaggaaattcacagggcacgcaaggcgcggcgcgaggcgcagcggcggatcgggaacgcaagcgccgccgatccgccgcgcatgccgcagcccgccggctcaagcgctgcggcgcgcctcctcgtcgagacgttcggcgagccacatcttgatcacggcctgccgcccgatgcccacgcgcttcgcttccttgtcgagcgcctccaccatccagatgggcatgtcgacgttgacgcgcttcgtctcggttctcccctcgaccaccaccgcggaatcgaaatcgaagaacccggtcacgtcgcagccttcgtcgaacagctcttcgagattctcagaggttatcttttcgttgctcatagcgaatcctctcttgttccgtcgctcgccttaccgagatgattcgaatgcggtcgcccctatcggtcgcgatcgccgtccaatggactccgcgcaggacgccgaccaccgcatatcgtcgctctcctcttttccgcgcaggagccttgatgtagatgccctcccaaagctgctgcgcctcatcgaagtcgataccgtgcttctgaaggttcgccacgctcttcttcggatcgcattcgaacgtcagtattgaacctaaagatatagtaattatatccataatatacctttttcgcaatctatgctcgttattccgttccccgtccgtcactcgaaatcggtttcggtttcgatgatgctgcgatagaggcgcatcgtttcgagggaggggtcgatacccagctcgtcggtgaggaagcggcggcaggcaaagtaggtctcgagagcggccgtacgctgccccgcggccagctgggcctgcatgaggcagatgtaggcgtcttcgcgcgagcggtcgcgctggagcgccgcacgggcgaaccagagtccctcctgggcctcgcctgcagcgacgaggcgcgtcgaggcggccaccagcgcgtccacgaggcggttgcggtagtccacgcgcagcgacgcgagggcgtcgttgccgttctcgctgggcagaagatcgtccgagaagcgatcgttgacctgcgagtacacctgcgcccagccgccgtatccgggccgctcgaacagcagcgtgcggcacacgtcctcgagctgcgccacatcgctcgtcagcaggctcgcgtcaagtctcaacccctgctgctggcgaatgagatagggacactcgcccgacggcagcgtcagcgcgcggcgcagcatcgcccaaatgccgtagaagttcttgcgcccgtgcatgatctcgctgtcgggccacagaagacccaccagcttgtcgcgcgagaactcgcggccgttgtgcagcacgagcagggcgagcagcgtcttgaccttctggcggctgaacagcgacggatccacccgctcatcccccatcagcacgtcgaggcccccgaacaggttgacggtgagcgcgggcacggaggacggcagcttcggcaggcgagtcgcgcgaccctcttcacggtatgcgtcgggatgggtggcgacgaatacgcgctcgcgttccaatcgctccagctccagccgctcgcacgcgttgcgctgggagaacaggcgcatctctatgcgcctgacggcgagggccgcctgcgcgtcgagcgcgggaacggcgatcgccccgcgctcgcaggcccgctcgtaggcgatgccggccaaagcgtcgccgagcccgagcgtgccgcggctcgcctgggacacctccttgcgcacgaaggcgcccaaacggtcgagctcgatcgatcgggcctcgccggctcccgacgccgcagcttgacgcagcacttcggcggccgactgcttgaggaagctcccgcgcgcgccgtcgtcgtgccaatcgagccatacccgagcagcctcggggcagcccgctttccgcagctgcgcatgcacgcatcccgcagcgagccatccccgatcttccggcgccttcgcgcagacggcctcacggggcgcttcggccgcatccgcgatgcccgcggccgcgagcagcgacacgacgagcttgtcggcgcgccgccgctcgtccgcttccgcgcattgcgcgagcaccaacgcgcccgtcatccgcacggaggacggcgcgttcctgtcgcgcaccgccttgcgcgcggcaacgcaggccgcttgtcgatcccccaaaagcgcgcggcgaaccgcctcgtgggcgctgagcagagcgcccttccccgccgtctcgcccgataaggagcggtgcacctcgcaggccggcacgaggcaagcggcttcgagcaacgccgccccgtgtttcgcgagccaggacgctcgcggggcgcgcgacgccagcaaacgtacgaaatcgcaggcccgttcgtgctcgccgcgcatcgcgagcgcatcgcccaagcgcacgacgagcgtgctcgcatcggagaacaacgaccgatcggccaacgcgcccagcttgcgcgcaaacgcgccggcgagggcttcgacctcgaacggcgcggcctcgaaccggccgctgcgggagtcgatgccgagataggggtactgctcggcgagcagcgcgtcctgatcggggccgaacgggccgaacgccgccacgtcctcgaacgtccccttccccagcgacgccatcacgaacagcggcagcagcaggtcggccggaagctcctcgccaagcacggcggacaagaaccccgcgcgctcctcgtccgacccccatacgaacgtggcgacgcggcacgcgggcgcaatcgtcgatgcgggatcgctcgagcgctcccccggtgtgcggagcaggtccacttcctcatcggtgagcagcaggtcgacggccgtgagcttgatgcggtcgcgatgacgcgcgaaggcgtcgcgcgatggcatgcaggccaccatcacctcgcaatcgcggtcgagcagcagatcgagctcgtcggataacagctcggcgcgctcaggatcgagcagcggcacatcgtctatgacgacgaggaacggctgcgggtcgccctccaaaagcgtgcgcgctatgacgccgcgatcgagatcgcgcaagaagcacgggctgcggccgtcgagccagaccacatgctcgaacgagaacaccgtatcggcgtattccatcgcaagacccgtcttgccgaagccgtcgggcgcgacgatgaaccgcgcgacgtgccgctcgcgcaaaagcttagcgatgaggttggggcgaggtatctggcgccgcgggacgagatgcagcggacgacggcctcggcacgacgccttcttgaggaattccggcatatgatccactcccttcttcgaggggagtgcgtagcgagagaggaatcgaccttactaccgaaaccagcttcgcgcaagccgacatcggttcgactccgctgcgatccgcggtgtacaataagcgaatcgatccgccccgtcgctagggagaacgccatgctgcaacccgcaacgctcgccgatttgcccgcattcctctgcgcgcacgccgaggacgcccgcgcgggcaccggctgcaccgtcttcatagctcctgacggggccacctgcggcgtcgacgtgcgcggcggcggtcctgccacgcgagagaccgatctgctcaagcccgagaacatgatccaggccgtgcacggcgtggtcctgtcgggcggcagcgccttcgggctggccgccgcgaccggcgtcatggacgagctggccgcacgcggcatcggctttcccgtggagagcgcccgcgtgcccatcgtcgtgggagcctgcctgttcgatctgctggtcgggcagaacgcccatcccgatgccgccatggggcgcgctgctgcgagggcggcgttcgagcgcgaggcggcggaaccgctggccgaaggcaacgtgggcgccggatgcggcgcatcggtgggcaagctcctcggcggcgagcgcgccatgaaagccgggctcggaatctgcggattgcgcctgggcgagctcacggcgtgcgccgtcgtggcggtgaacgcgctcggcaacgtgcgcagcgcggacggtgcctggatcgccggctgccgcgacggagaagggcgcgtcatggatcccctcgaggcgttcggcgtcctcgcgcagcaggcggccgcgcatgcggagcaggaagccgaccccgccgcaggtccgtgcgccaacaccaccatcggcgtcgtgctgacgaacgcgcgtctgacgaaggcgcaggcgacgaaggcttcttcgaccgtccacgacgcctacgcgcgcgccatcaagcccgtgcacacttccggcgacggcgacaccgtgttcacgttcgcatccggcgaggtggaagccgactacgatacgttcgccatccttgccaccgaggccatgcagggagccgtcgtgcgtgcggtcgagcaggccgagggcgcctacgggttgcccgccgcccgcgacctcgtctcctgttaggaagagggcgacatgaaaggggctcagcttgccaaccgaacgctgttcgtcgcttcggtgatcgtgaccggcgccatcgccggcgcgttcgtgtggctgctcttgttcgccatgaacctgggcatcacgttcatctgggaccggctgcccgcgcatttcggcccgtacttccccttggccgcctgcctggtgggcggcctggtcatcgggctgttcgccaagaagttcggatcgtatcccgaagacttgaaccaggtgatggcgaaggtgaagcgcgacggccgctacgactacgacaagctgggcgtcatgtccgtttccgcgctgctgcccctgttcttcggcgggtcggtaggccccgaggcgggcctcaccggggcggtcgcgggcatctgcacgtgggtgggcgatcgcatgaagcgcttcggctcggacttccagcagctcacgtcggtcggcaccatggcggcgctgtcggccatcttcaccgcgcccctcttcgggttcgccgcgccgctgtacgacgacggcgacgaggcgaagggcgcgcaggcagccatcacgctgccgaagtcgtcgaagatcgtcgtgtacctgtgcgccatcgctggtgcgctggcggctttcctcggactgggcgcgctgttcggcggcgggctgtcgctgcctcgtttcaccgacatccacgtgggagcgaccgagcttctgtggctcgtgccgctcgcgctggtgggcgcggcaggcggttggctgttctgtgcgttcgacggcctgttcgagcgcctgtccgaacgcatgggagagcgtcccgtggcaaaggcgctcatcgccgggctcgtgctggcgctcatgggcatcgccttgccgttcacgatgttcgccggcgagacgcaggccgagcagctgggagaggtctggggcaccatgacggcgttcgcgcttttggccacgggcttcggcaaggtgctcgtcacgcctttgtgcatccgcttcggctggcgcggcggccacttcttccccgtcatcttcgccggcatctccatcggctacggcatggccatgctcaccggcgccgaccccgtgttctgcctgtgcgcaagcacggccgcgctcgtgggaggcgtcatgcgccagccgctcatgaccgtgctgctgctgttcctctgcttccccgtgaagggcatcgtcgtcatgctggccgccgcggccctcggcgccgccgtcccgctgccgaaagccttgcgcgccgagcaagcggaaggttgacgaaacaaaaaaacgccgccgcggaaggcggcggcgcaggacgcatcaaagcggcgatgcgcgaaagctactccttgcccagcatcttggcgatgcggtcggagtactcgatgtcggtaaggcccgcttcggcggcgaggtcgatgacgggcgcgtcgttccacagcgcctcgaggcgatagtactcgcgcgtctcgggctggaacacgtgcacgacgaagctgccgtagtccagaagcgaccacgtgccgtcctgcgtgccctcgcgatgcaggggcttcatctgcgccttcgtgcgcaccgcatcctcgatctcgtcgatgatggcctccacctgacggttgttggaggccgtggcgatgacgaagtagtccgtcacgccgatgaggtcgcgcacctcctgcaccatgatgtcggtggccttcttctcgtcggccgcgcaggccgcgatgagggcgcattccctcgaagtcttctcggtcgtcgttgtgctcacgctgttcctttctcggccttcgcgtcgcgcgatcgggccacgtaatggttccacacctcgacggttgccgggtgcaggcgtcgccggcgctccacgagcgtcagcaggatatggttgaacgtcatcatgaagagctcttcgagcggcaccgcgccgatggcggcgcgcagctcgtcgaggccgtcgaagtcgcggctgggctcgatggcgtcggcgatgtatatgatcatgtccagatcgctcatgcccaccgccgcggccgtgtgccgagcgatggcctggaccacgtcggcggacaggtcggggtacgcgcgcacgagctcggccgcggccgtggggccgtgcagcagacgcggcatcgtgtccagcacgtacgggtccacgtccacgcccagcgcgcgagcgcgctcgcggatctcgtcgtcgccgtactccttgtcccaatcgtgcagcaggccggccaagcgcgccttgcgcacgtcgacgccgtacgtctcggccaacgacgcggccgtcttcgacacgcctcgcgcatgctcgaaccgcttgggcttcaaccgtttcttcagatcgcgctcgcgcgcatcgaagaacgcatccgaaagcacgtcctcgctcatcgcacgcctccttcgtgatggggatcggctcggtacaggcctcgctcttgaatatagtcgagcacgccctgcatcgtcaaataacggatcgacttccccgccgctacgcgtcggcgcaggtcgctggacgagatggccagcgccgtcacctcgaggtagtcgatggcgaagttgccgtgctcggcgatgaacgcccgccgctcctccgacagcgcgtagccggggcgcgtgaccgcgatgaggcgggcgaggtcggcgatggccgcgctctcgcgccactgcacgatatggtacacggcgtcggcgcccgtaatgaagcgcagctccacgttatcggggtaatgcgcgcgcagctggcgtagcgtgtccacggtgtaggtgtcgccgccgcgctcgatctcgatggcgctcacgtcgaacgccgggttgctgcgcgtggcgatgcggcacatctccagacgctcggcagccggcgtgacggggcggtccttcttgaacacggggttgccggcgggcacgaacaccacgccgtcgaggtcgtaggcctcgcgcgcttgctcggcgcacgcgaggtgcccgatatggatggggtcgaacgtgccgcccatgatgccgaggcgcgcgcgtccgccgtcccgtcccaggtcgtcgaaatgatcgcagatgcgtcccactacgcgcgcacctgcccggatccgcgcagcacgtacttgtacgaggtgagcgcatcgagcgcgaacgggccgcgcgcatgcagcttctgcgtcgagatgccgatctcggcgcccagaccgaactcggctccgtcggtgaacgccgtcgacgcgttcgcgtacacggcggccgcgtcgacgcgcgcgaggaacgcctcgacagcggcctcgtcctcggcgacgatcgcctcggaatgcttggtgccgtagcggttcacgtggccgatggcctcgtcgacgccgccgaccacgcgcacggccaggtcggccgcaaggtactcggtctcccagtcggcttccccggcgggcaccgtgggcgtgccgccggccgcggcaacggcggccgcgcgctcgtcggcgtgcagcgtcacgccgcgcgcggccagctcggcgagcgccgcgggcaggaagccctcggcggcggcctcgtccacgagcagcgtctcggcggcgttgcacacgccgaggcggcggcatttcgcgttcacgatgatggcgcgcgccttatcgtagtcggcgctctcgtgcacgtacacgtggcagttgcccgtgcccgtctcgatgaccggcaccttcgacgtctccacgcagtggcggatgaggcccgctccgccgcgcggtatgagcacgtccaccacgccgtgcagctgcatgagctcgtcggccgccgcgcggtcggccaatgtgacggcgccgatgcagccgcggggcatgcccgcctccaccgccgcctcgtgcagcacgcgtgcgatcacctcgttcgaggccgccgccatgctgccgccgcgcagcaccgccgcgttgcccgacttcaggcagatgccggccgcatcggccgtcacgttcgggcgcgcctcgtacacgacggccaccacccccagaggcacgctcacgcgctgaagctcgatgccgctttccaacgtgcgcttttgctgcaccgcccccaacgggtcgggaagagcgacgaggtcctcgagcgcggccgccatggcttcgacgcggtcctcgtcgagcatgaggcggtcgaggaggccttctttcgtgccggccttgcgcgccgcgtccatgtcgcagccgttcgcctcgacgatggcggccgcatgcgagcgcaacgccgccgccatggaggccagcgcgccgttgcgctcgtctgcgctcgtctgcgcgagcgccccgctcgccgcgcgcgcctcctcggcgatgcgccgcacctggtcccgcaccgtttcccgttccatggttcccccctattcgaagacgaccaactcgtcgcgatggacgagcggcttgtcggccaagcttgccagcaggcggttcgcctgcagctccgcgcgggtgcgcccgatggccaacgccgcctcgtcgctagcgaacgccaccttgccgcgcgcgaacagatgccccgtcgcatccttgatgtcgacgatgtcgttcgcctcgaagcgcccttccaccgagcgcacgcccaccgacagaagcgagctgccgcgctcgatgagcgccgccttcgcgccgtcgtccacagcgagcgcgccgcgcgcggcatcgccgagcgcgatccacagcttcttgggcgtgatctcgtgcggcttcttcgcagccacgaacagtgtgcccacgtcctcgcccgccgccgcgtccacgatggcctccgcacgatgaccgtcgcacaccacgagcgggatgccggccaccatgagcacgcgcgcggccttgatcttcgtgatcatgccgcccgagcccaccgtggtgccggcttcgcccgccacggccatgatctcggggccaatggcctcaacgcggccgatgaggttcgcgtcgggatggtgatgcgggttggcatcgtagagcccctcgatgtccgagaggatgaccatgaggtcggcttccacgaggcatgccacgagcgctgccagcgtatcgttgtcgccgaagcggatctgctcgaccgagatggtgtcgttctcgttcacgatgggcaccacccccagctccagcaggcggtcgaacgtgtcgcgcgcgtgcaggtacgcccggcggtcggccgtgtcgcggcgcgtcagcagcaccgtggacgtcacgatgccgtggcgcgcgaacgcctcggcgtacgccgtggaaagcgcgctctgccccaccgaggcggccgcctgcaggctgggcatgtcgtgcgggcgcttctcgatgcttaagcgctcgaggccgcaggcgatagcggccgaggtgacgacgatggggcgccaaccggcggcgcgcacgcgcgcgacctggtcggtcacctccgcgaggtaggcgtagtcgatcttgctctccgacgtggtgagcgtggacgacccgatttttatcacgaggcgcttgccatgatcggcggcatgcgcgcatccagccggcttcatcacaggtcgagctccttgaacagatcctccgccgtgcgaaccgactcgaattcgaacgctcggccgacaatgcggatctcgtcgccgtccacggcgcccgccttctcaagcgccttctccacgccgaggcgcttgaggcggtgctgcaaaaacgcgatggcttcttcgttctcccagtcggtctgcaccaccatgcgctccacctgcgggccctcgacgcggaacaccccgccgccgagcggcacgaccttgaactgcttgtcgcgttcctcgcgcttgtgctcccacacgtgctcgtactgcacgtcggcctccgaaagcgcgcgcagctcctcgcgcagctcgtgcaccttggtcgcgatggcggccttgaggccgtcgacgccctcgcccgtgagcgcgctgatgcggtagagcttcggatcgacggggctcggggcgaactcgtcgccgcccgctgccgcgatcgagtcctcgcgcacgcgctcggccagccggtcggcgacctcctccgcgccgggcacgtcgatcttgttcgccaccacgatgcgcgggcgcgccgccagctcgtcggcgtacagcgccagctcgcggttgatgatatcgtaatcctccagcggatcgcgtccctcgtagtcgcccgtcaggtccaccacgtgcacgatgagcgccgtgcgctcgatgtggcgcaggaactcgtgtcccagaccgcgcccttcgtgcgcgccctcgatgaggccggggatgtcggccacgacgaagctgtagtcccccgaacgcgccacgccgaggttcggcacgagcgtggtgaacgggtagtcggcgatcttcggccgcgccgcgctcatcttagcgatgagcgacgacttgcccgccgacggcatgcccacgagggccgcgtcggccatgagcttcatctccagctcgatccagcgctcctgcgacggctcgcccagctcggcgaacgcgggcgcgcgtcgggtcggcgtcacgaagtggatgttgccgcggccgcccatgccgccctcggccacggtgacgcgttcgccgtcgtgcgtgaggtcggcgatgagctcgcccacttccttcgattcttcgaaatactcgtggacgaccgtgcccatcggcaccttgagcacaaggtcctcgccggtggctccgtgcatgcgcgagcccttgccgtgcgtgccgcgctcggctttgaaatggtgtttgaagcggtattcgatgagcgaggacaggctggcatcggcctcgaccacaacgttgccgccgtgaccgccatcgccgccgtccggaccgcccttcggcacatgagcctcgcggcgaaatgacatgcagccggcaccgccgttgccgcctttgacatggatgcgtactttatcgatgaacacgggtggtacctctatttcgatccgcgcctcgaggggcgcaacgggttgctcgcttgaacacgacaactcggattgtatatgaaaaatgccccctgacgagcagggggcatgcgaaaacagataacgtcacgcagtcgtgggcaggcggaaccttacgcctcgcgacgcacgtgcaccttgtgcttggcgcccttcgtgaactccagcttgccgtcgcacagggcgaacagggtgtcgtccttgccgcgaccgacgttctcgcccggatggatgtgcgtgccgcgctggcggacgatgacgttgcccgtcttcacagcctggccggcgaacatcttcacgccgagacgctgtgcgcgggaatcgcggccgttacggctggaaccgagacctttcttgtgtgccatggtattccctccttatgcttactcggcgtcttcggacgcgggcttgtcggcggccttagcaggagccggcttcttctcgacatcgtccttcttcgcagccttcttgacggccggcttctcagccttggccgagccgacggactcgatctggacgcgcgtgagctgctggcgatggccgcgcagcttcttgtagttcttgcgcttcttgaacttgaagaccagctgcttctcacccttgaactgctcgaggatgatggcggtgaccttcgttgcggccgctttcgcggggtcggcttccaccttggcgccgtcgacgacgcagatggcttccagctcgaccttgtcgcccacggcggcgtcaagcttctcgatgttcagcttgtcgccgggtgcgaccttgtactgcttgccgcccgtttttacaattgcgtacatgagtgtctccttgatatgaataaacgcaaggcgatagcttaccagcgtgaccgtagcaagtcaatgtgatcttatgcacgatccacgcgtatcatcgcactcttcctacgctgtgcctccacagagcacaacgtttatatgatagcagatactctagccacacgcggcggcgtggtgtgatttttttacacatcacaagtccagcaaaatcagcgagcaatgatgcggcttctgagcgtcggccgccgagtcgacgtaacctcagtgcgcttccgcccagttatcggcataggagacgtcgacgtcgagaggcacgcgcagatccacgatgtgctccatcacgtctttcacgatggccgacagctcctcgatctcgccttccggcacgctgaagtccagctcgtcgtgcacctgcaacagcagcttcgcttcgaagccgcgctccatgatgcggcgctgcacctcggtcatggccagcttgatgatgtcggccgcgctgccctgcatggggtggttcatggccgtgcgctcgccgaagccgcgctgcgtggcgttcgcggccttgagctcggggatatggcgcttgcggccgaacatcgtctcggcatagcccttctccttcgcttcggcgatggtgcggtcgaggtaggcgcgcacgccggggtaggcctcgaagtagcgctcgatcatctccttggcctcgccgaacgggatgcccaggctctgtgacaggccgaacgcctgctggccgtacacgatgccgaagttcacggccttcgcgcggctgcgcagctcagggctaacgtcctccacgggcaggccgaacacgcggctggccgtggcggcgtggaaatcggcgccggagcagaatgcggccacgaggtgctcgtcgttcgacaggtgcgcgagcaggcgcagctcgatctgcgaatagtcggccgacaggaacttgtggcccttctccagcggcacgaagcactcgcggatctgacggccgaactcggtgcgcacggggatgttctgcaggttcggctccgacgacgacagacggcccgtcgtggtcaccgtctcgttgaagcacgtgtgcacgcgcccgtcgtcggcgcgcatgcgcggcagggcgtcgatgtaggtggatttgatcttcgccagctcgcggtagcgcaggacgagcgccggcatctcgtggtcgttcgacagctctttgagcacggcggcgtcggtggagtagccgcgctggttcttcttgagcgtgcgcaggcccagcacctcgaacaggatgtgcccgagctgcttggggctgtcgaggttgaactcctcccccgccatctccacgatgcgggcgcgcagctcgtcgagctcggcctgcgtcgtcgcccccagctcggccaggcggtcgcaatccaccgcggcgcccgttcgctcgacgatggcgagcaccgccacgagcggcagatcgatgtcgaagtaggcgcgcttgctctcgtcgcgcccgagcgcgtcggtgagcggcttcaccagcatgcgggccgccgcggcttgcgcggccgcactgccggcctcgtccttggcctcgggcagcacgccgccgcagtaggcgtcgagcagcgcgtcgtaggagtactcggacaccgacgagttcagcacgtagcccgccagtcccaggtcgaacgcgcgcatgcccatgagctcggcatcctccacaagcgcgatctcggccgtgtcggcgggatagacgcgatgcacctcgcgcttgacatcgagggcggcgaacgagccggcgcgcacgatgcgcgcgaacgcctcgcggccctcgtcgtcctcgaacagcgccgtgccctcgctcgtgttcaccgcgcaatggagccccgcgttgaacagcgacacctgctcgggctcgatgaacgccacgcccaccgtctcgccgcgcgcgacggccgcgtccacgagcgcgtgcgcctctgaccccgagaccaccggctccaccgcaagcggagccgctttcttctccagctccttgcccacgagcttgagcacgcggccgaggtgcgcgttgaactgcacgcccttgaatgcttcggtcaccttttccgaatcgaacgaggggaacgagcatgcttcgaggtcgagcgggaagtcgaggtcgcgcacgatggtggccacgtcgcggctcaagaatgccatgtccttgttgtcgacgatcttctctttctgcttgcccttgaggtcgtccacatgctcgtagatgccctccaggctgccgtaggtctgcagcagcttcgccgcggtcttgtcgccgatgccgggcacgccggggatgttgtcggacgagtcgcccttgaggccgaggaagtcgatgaactggtcggggcgcacgccgtaacgctcgagcacctcggccgggccgtagatggccacgtcggtgatgcccttcttcgtggtgacgatgcgcgtcatgtcggtggccagctggtaggcgtccttgtcgcccgtcaccagcagcgtctcgtagcccagctcctcgtcgcgcgcggcgatggtgcccagcacgtcgtcgccctcccagcccttgatgcgcaccacgggcacgttcatggcctccaacagctcctcgatgatggggaactgcaccttgaggtcgtcgtccatgggagggcgctgggacttgtactgctcgagcgcttccatgcgaaacgcggggcggcccgcatcgaacgcgcagatgagcgcgtcggggcttgcgatgtcgatgaacttgaggagcatggcgatgaagccgaacacggcgttggtggggcgcccgtcgggggcgttcatggtttggggcacggcatggtaggcgcggtgcataagcgagttgccgtcgatgacggcgatcttcttcggcatgggctgtcctccgtcgggtggtgttttcgggggattagtatagcgcatgtgacgttgtccgctccggggcttcgcacaatgcccagtcgctcgacagtcctgctcgcgcaaacagcccactgggctgtttggctcgtgcggaactcgcttggtgggcaccgcgcgaagcccctgagctgccggcatctcctcgaaagcatcgtacgcgcggcggctgcgcctggcggggacgacctgcgaggcggcaacgctctcatgctaccttggtggaggaggttcttgttgggaggtttgggcgggtggcggactgctcgacctatgcgctccagaggtagccgacgccgcggacggtttccaggtgctgggccagttcggggcccagcttcgcgcggatgcggcggacgtggacgtccaccgttcgcgagccgccgtagtagtcgaagccccacacgcggcgcagcagcgcgtctcgcgagtacgtgcgcgaggggtgcgtgacgaggaaggccagcagcgcgtactcgaggtaggtgaggtcgagcggctcgccggccacggtgacctggtaggttgccaggttcaccgtcatgttctccacaacaagacagtcggacgtggcggcctcgttgccgggccacagcagctggcggatgcgcgccgcgcactcctcgggcgaggcgtttcgcatcacgaagtcgctcttcacctgcacaggcagacgaaagcgcgcgagctggccctcccccacgatgaccaggagcgatgccgttccgtcctcgagcagcagcgcctcgatgccggccacgtcctccgaggcgccgccacgcgcctcgtatacgacgagatcgcatgcgggatggcgcccgagcagcttcttgaactgggcggaggatcccgctgccacgtccacgtccaggctcgacagcacctgctggaacttatgcgcgttgtcgaggctgtcggcgacgaatatcacctgcttgcgctgcatgccccctcctttcgcacgtcacagcaccgcgagatagcggtcgcgctcccactgcgacacgtacccctggtagtcgttccactcggcgcgtttcgcggccacaaggtacgaatggatgtgatcgcccagcgtggcgcgcatcagctcggattccgcgaacagctccaccgcctcgcccaggctctcgggaagcgtggcgatgccctgctggcgcagatcctggcgcgacagcatgaacagatcctggtcctcgttgggctcctgcagctccagctcctcttcgatgcccgcgaggcccgccgccagcatgacggcgaaggcaaggtaggggttcgcgctggggtcggggctgcgcagctcgaggcggcacgcgtcctcgctcgcaggtcggtagcccggcacgcgcacgagcgtggagcggttcgagcgagcccacgacaggtagataggcgcctcgccgccggcgatgaggcgcttgtacgagttcacgtgctggttcgtgatggcgcagaactcgggcgcgtacttgagcaggcccgccaggtagcgtttggccactttcgacagacggtagccctggggatcgtccggatcgtagaaggcgttgttgccgtcgaggtcgtaaaggctctggtgcacgtgcatgccgctgcccggctcgcccgccatgggtttgggcatgaacgacgcgtacacgccgtgcttcatggcgatctccttgacgaccagcttgtacgtcatcaccgcgtcggccatggacagcgcgtcggtgaagcgcaggtcaatctcgtgctgcgacgggccgttctcatgatgtgagtattccacggggatgcccatcttctccagcgtgagcacggtgtcgcgccgcaggtcagaagcgtagtcgaggctggtcagatcgaagtagccgccgcggtcgagcacatcggtgccctcggcgtccttgaagtagtagaactccagctcggggccgacgttgaacgcataccccatctcctgcgccttctccaccgtgcgggccagcacctgacgcgggtcgccctcgaacggcgtgccgtcgggcgtgcgcaggccgcagaacatgcgcgccaccgcgttggactccggccgccagggcagcacctggaacgtggaggcatcggggaacgccagcatgtcggactcctgcgtgcggcagaagccctcgatgcagctgccgtcgaagcccatgccgtcggcgaaggcgtcctccagctcgctcgggatgaccgcgaacgacttcatgcgccccagcacgtcggtgaaccagaagcgcacgaaatggacgtcgcggctcttgatggttttcaggacgaagtcttgctcgggggtcacggtcatcggacgatcctttctctctcgaaccaccattatactcgccggtgtttcggttgcgtttcgcgagagggacgatggtgacggtccgtcgccagaaccttgccgcttcgccgcgctgcgcgccgcgtgctatactttatccatccgatcagcgacgatcaggaggtataccatgaagttcaccaacatcctcgtgccgttcgacaaatccgaccacgcattgcatgcattgaccctggccaagggcctggcggaggaggatcccgccatcaagctgcacgtcatcggggtcgtgttcgtctccgacatcccgcctgcgctaggcctcgacgcgaacccgtacgagagcgcgccgccgctggtcatccagcccgacctatacaagaagctcgtcgaggcggcgctcgaccgcgagaaggacgacatgaagcacgccatcggagggctgctcgacggcatgcccaacgacgtggacatcgccgccgtcaacgcgccgtcgcccgtcgacggcatcaacgacttcgcgaaggagcacggctgcgacctcatcgtcatgggctcgcgcggcctcggcgtgctgcgaggtatgctgggcagcgtcagctacggcgtcctgcgctccgccgagatccccgtcctcgtggcgaagaaggacgaggaagagaagtagcggaaggaagctgtcgcggtcccgacggctcgcgcctgttttcgcgcgagccgtcgggcacgaaggctctataagttggtatactggcttgctatggaaatcaatcgataccaaacccgcaagcccaagcgcctcgccgtcgtcacgatgggagtgaagctgggcgacgagacgcgcggctacacgcgctttcgcttcctgtcggagctgctcgcgcgcgagggcttcgaagtcgacctcatcacgtcatcgttccagcattgggacaaggcgcatcgcgacacgtcgaaagcatgctaccgaaaccttccctacaacgtagtgttcatcgacgagcccggctacacgaagaacctcgatctcacgcgcattcgcagccatcgcgtggcggcgaagaatttgcgagagcatttcgagcgcacggcgggcacctacgacctcgtctacgcggagattccgccgaacgacgtcgcgcgcgtatgcgccgaagaggccgacaagcagggcatccccttcgtcgccgacatcaacgacctatggcccgaggccatgcgcatggtggtggacgtgcccgtggtaagcgacgtggccttctaccccttctcgcgcgatgctaagcgcgtctatcagctgctgtcagctgccgtcggaacctctgacgaatacgcagcgcgtccggcgaaggatcgcgcgaagccctacccgaaggcaaccgtgtacgtgggcaacgacttggcggcgttcgacgagggcgcccgcatcaacgcgcccgcagtacgcaaaccggaaggcgagctgtgggtcgtctacgccggaacgctcggcgccagctatgacgtggcgaccctcgtcgaagccgccgcgctgctcgagcgcgggcgcctcgtgcgcgccgcatcgaaggacgacgaactgccgcctgcgctaccccccgtgcgcgtgaaggtgctgggcgatggtcccgatcgcgagaagctcgaagcgctggccgtgcagctgaacgcccccgtggattttctgggctacacggcctacgagctgatggcggcgtacttgtgcgcatcggacatcacggtgaactcgctcgtcaaatcggcggcacagagcatcgtcacgaaaatcggcgactacctggccagcgggaatcccatgatcaacacaggctcgagccccgagttccgcgcgaaggtgaccgccgacggcttcggagtgaacgtcgaagcggaagacgcgcaggcgctggccgacgccatcgcgaagctcgcaggtcacgcgtcgctgcgcaagatcatgggctcgaaggcgcgtgccgtcgccgaaaaggagttcgaccaaccccgcgcgtaccgcgagatcgtggatttgctgcgcacgttactgtgatttctgtcgaacgactcgccaaagcgggcggagcgcgtcaaaatagggagcttgcatacgccgattgcgtgcgatcacgcaggtcgcacgccgtttacagggtaccaaggagcaatcgtgactgagcagaaacgcatttcgttctcaccgcccgacatcacgcaggcggagctcgacgaggtggccgacgcgctgagaagcggctggataaccaccggcccgaagacgaaggagttcgagcgcgagatcgccctcttcgcacaggccgagcgctcggccacgttctcatcggccaccgcagcgctcgaatgcgccctgcgcgctttcggcatcggcccgggcgacgaggtgatcacgagcgcctacacgtacacggcctcttgctcggtcatctgccatgtgggtgcgactccggtgctctgcgacgtggcgtccggctcctacgagatggattacgacgccctgcccgatctcgtcaccgagcgcacgcgcgccgtcatccccgtggacattgcaggacgcatggtcgactacgaccgtctgttcgccgcactcgattcgacgagcgaccgctggaagcccgcgacggagctgcagagcgcgttcgatcgcgtcatcgtcttagccgacgccgcccactcgttcggcgcgacatatcagggacgtccctccgggtcggtggccgacttcaccgccttctcgtttcacgccgtgaagaacctgacgacggccgaaggaggcgcgcttgcatggcgcgcgggcgcgttcgattccgacgagctgtaccgccggttcatgttgcagtcgctgcacggccagacgaaggacgcgctggcgaagaaccgcgcgggcgcctgggagtacgacatcgccttccccgggtggaagtgcaacatgaccgacatccaggcggccctcggcctcgcgcagctgcgccgctaccccgcctcgctcgcccgtcggcgcgccatcgtcgagcgctacgagcgcaacctgggcgaatgcgatgtcgagctgctgaggcattacggcgaagacttcgagtcgagcgggcatctcatgctcgtgcgcctcacgggcaaatcgtcggcgttccgcaacgcgctcatcgagcggatggccaacgacggcgtggcgacgaacgtgcactacaagccgctgccccttctcaccgcgtaccgcgacctcggcttcgccatcgccgacttcccgaacgcgcttgcgcagttcgagaacgaggtgacgctgccgctgcacacgttgctctccgacgaggacgtggactacgtggcgggatcgttcaagcgcgccctggacggactcgaggcggaaggcgtccgctgatgtacgtgagtttcggaaaacgcgtgtgcgacatcgtcgtagggctggtggcgctgcccttcgtgctgctgatcatcgcggtgctggcaccgttcatccacttcgaggacaagggccccgtcttctacaacgcgccgcgcgtcggaaaagacgggcgcgatttcaagatgtacaagctgcgctcgatgcgggtgaacgcgcccgacctcatcatggaggacggctccacctacaacggcgccgacgacccgcgcatgacgcgggttggtgccttcatgcgcaagacgtcgctcgacgagatgccgcagttcctcaacgtactgaaaggcgacatgagcgtcgtggggccccgccccgacttgcgccgcgaaacggagctttacgagggagaggaaggcctcaaactcaccgtgaagcccggcatcaccgggtacgccgccgtgtacggacgcaactcgctgccctggcacgaccgtctggcgctcgacgtgcactacgtgcgcaacgtgtccttcccgctcgacgttaaggtgttcttcaagacgttctcggccgtattcaaccaagagggcgtcttcgtagaggacgggtcggagaagtaacgttcggctaacgtgacccctgccgacccgacgcgcacgcccctcaccctctatcatggtcgtgcgccacgcaatgggggcgttcgacaaaaagcacgcaggagagtgagaccatgacgaacgatcagacggcaatgcttgcacggtacggcatcgattacgccgaagcgatggagcgattctgcggcaacgagtccctgttcgcccgcatcgccgtgaagtacctggacgacccgcatgtcgatgcgctcgaagccgcgatggccagcggcgacgcagccgcagccgagcgcgaagcccattcgctcaaaggcgtcgccggcaacttgtcgttcgtgcgcctttacgacctggccgcgcgagtcaccgatgcactgcgcgccaacgatatcgacagcgcacgcaccctcatgcccgacctgcgcgagagccacgttgccgtgctggaagcgctgaagaacctggaagagtggggactttcgacctcgatgcgctagcaggcatcgaggcagaggcgcctacgctttcgccttctcacggccgaacagctcgttccagtcgcttgcggccaatacagtgcccgccaagatgaccacgcagcagacgatcgatatcggcgtcggcatcgttccctgcaacacgagcgcgaacaggacggcccaggccgaatagctgatattgagagccatggacttcgccgccccgataggcgacgagatgctcttgtagtagaacaggtacgacacggttccagccaaagcagccagccctaccacgcccgtcgcgagactgggaacaactgcggccgtgaaaccccaggcaccgaatagcggcaatacggcgatcgcgtacacgagcgccgacgtggtctcgcggatctgaagcgccgtctcgttgtcgacggcatcgtcgcgcataccccaagcgcagatgactgcttcggatccccatcccaaaacgcacaacagcgcaccgaacaaaccgaggatcggattgcccagctccgattcgccggaagacacatagcccatgacgatgataccggcaagggccgccagcaatgcgatgaactgcttaggcgccatgcgttccttcaggaacacgaaggcgaggaaggcgccaactgcaggatagaacgacgagatgatggcagtatagccggcaccgatattgttgatggctatcacgtagccggtcatgccgataggcccgcccaaaagcgcccccagaatgaccgccttgccgctgcgcgttttaagcgccgctaacgtgtcgcccagacgaccccgcacgcccatgtagatcaacagccagatcgcgcagaagatgtcatgcaaagcggcgctcgcgatagctgcaaacgcaatcgcctcggcagtgccgatgaaagggctcatcgacaatccgattccgaggacgaccgtgtcaagaccccagagcaagccgctcgtcagaccgaacttcattcttccaaaacccttcatggcgctccccttagtcgcttccctgacggtaccagtccagcaccttgtccagataatccttcgcataacggtaatagacgtacagccactcgccaaccatgtccccttctgcctctttgagcagcgaccacgcgtaccagcaccatcccgcaagcgccacgaaggcgaagttgtgacggcgctccgccgcagacggctcgcgcctgaaataatacgcaagggcacgcgacgcctcctcttcgctcagctggcagcacaccgcgaacgtgccgaaatcgcttgcgtagtcggacatgccggaatactcccaatcgatgagcgacatgtcgtcctggtcgtcgataaggaagttcagcatgaagaagtcgttatgggtcaggcagatgcgcgcatcgtctgcatccacgaagcgcttgagttcctcggcccgtgcagccatctcagcataacccggcacttcaatgcggccggacttgcgctccagcagacgctcgtaacgcttgccctcggtgaagaaatcgaacgagcgctccaccttcgcaccggattcgtgcaggcgacgagccatttccattgcacgcttgacctgctcagggtcatgcggatcgagctggcggcaatcggggataaagcgcgacagcttccagcctttttcgggatcctcggtgatgaacgtacgatcaagccccagatcgcgcgccacgccttgagccaccacctcggctcggcgatcgatgatgccctccgtcccgatgccgggatggcgatacacgtattcggagtcgcccacacggatatggcacgatagattggtgaggccctgcttcagcggatacacgtcgcgaatatcgtctttgtcgcacccgagcgctgcaacgatattgtcgaacgcctcggaatcgacgttttccaggaaacgcggatcgaattcgcgcagctcgtcgagtgtgtcgaactcgaataccgttccgacggggtactcgcgcgcaaccatgtccaactccgcgatatggtcgacgtacagctcttcccacagcttatcggccgtcgtcggcagatcgtactcctcctcgagtattcgggaaaaggcacgagaaaagtttttatcgaagtaaacatggccgagcatgataagagagtcgctgccaccgatatcgaccgaaacgatgcggttgcccgaacccaaacgcatgcaccattcgttcgtagggccctcttggtattgggcagcgtaataggccttccacacgtacggctcgaaggggttctcgacgaagtagttgtcggaagagcatatgaacgtgttgcccagacgctcgcgcaccaccatgagagaggaatggttgttccgcgtggcgtattcctcgttcacgacgatggacacgccgtgcttctcttcaaggtagaagaagtactccttcttgtaccctgccaccacagtgatgtcgtcgatgccggactcctgaagctggcggatctgacgctcgatcagaatctctccacgaacatgcagcagacctttgggcttctcgtaggaaataggggcgaaccgcgacgacaggccagctgccaagatgatagcgttgtccaccttaaaaggggcgagcgcctcgaacccggcgtcggacagtgcgccgtcgacgacaagccctttgtcgaccagcgctttgtaggccgcgttcaccgaacccaacgacatggccttacgagcggcgatcgcccgctggctcgtccccggttcgcgttcgagcgcagcgagcaccgcgaattcgttcttcgtgatcaaaacggagcatcctttcatggcagattcagacgatctcgatcgtgcgtcgaagttcattttttattgtattttaaagaatatgaacggtatgttcatttatatttttctactacaaaatatgaacacatagaaaacgcgctccccgttctcggagagcgcgccgaattttgcaggagatgcccgtcgccgccgaatcaataacccaaaagcttgtctacaacgttcatgactttcgtgccataggtcttgtcagccgcccaggtaccggaaagcttgtcgaccgtgggtgccgagccgcgcttcccggcaagaagaccgaatcgcgtgtcgacacaagactgattgagcggtgccgttgaagcatagcctttcaagtgctgagcctgcgccagaaggcccgttttcacatctgggaactcttcaccagcaacgccgttgcccgttgcgcccagtcctccgaaattgcactgcactttgccgttcctgtccacgtctccgccgaactgcagccatccggtctccaccatggcctgagcgaacagcacctcggcgcggacatcctcggatcgagcctgatccagcagcacctggcaaaagtccttgatggtggcagcccctcgcgacgtgtacttatcaacaggataaggaacgccctgcgcgttgaagagcgtcaccatctgctccaccgtcgcaagcgaagggcccatgatggagtcggacggcagcagcgcacccgacgaatcgaagcggtaggtctcgccttctatagtggcctttcccgtgaccatcgcgcccgactccccaagatagtagcgcttaccgtccaaatcgagccaaccggtgtgcatggctcccgatccgttcaggtagtaccaagtgccaccctgcttcatccagccaccggagcgcatggcgcccgagccttcgaagtagtaccacttgccgtccgatgccttcgcccagcccgtggccatcctcccgctctcggggtccagccagt
